(19) United States
(12) Patent Application Publication
(10) Pub. No.: US 2020/0063182 A1
(43) Pub. Date: Feb. 27, 2020

(54) FLUOROPHORE-BASED KINASE SENSORS

(71) Applicant: AssayQuant Technologies, Inc., Marlborough, MA (US)

(72) Inventors: Erik M. Schaefer, Hopkinton, MA (US); Barbara Imperiali, Cambridge, MA (US)

(21) Appl. No.: 16/099,044

(22) PCT Filed: May 4, 2017
(86) PCT No.: PCT/US17/31059

§ 371 Date: Nov. 5, 2018

Related U.S. Application Data
(60) Provisional application No. 62/331,903, filed on May 4, 2016.

(51) Int. Cl. C12Q 1/48; C07K 7/06; C07D 215/36; C07D 215/26; C07D 221/08

(52) U.S. Cl. CPC C12Q 1/485; C07K 7/06; A61K 38/00; C07D 215/26; C07D 221/08; C07D 215/36

(57) ABSTRACT

Disclosed are metal-binding analytical reagents that exhibit chelation-enhanced fluorescence (CHEF) upon binding to Mg²⁺. Also disclosed are methods of using the reagents for detecting the presence of or quantifying the activity of individual kinases or groups of kinases in a sample.

### RELATED APPLICATION

[0001] This application claims the benefit of priority to U.S. Provisional Patent Application Ser. No. 62/331,903, filed May 4, 2016.

### SEQUENCE LISTING

[0002] The instant application contains a Sequence Listing which has been submitted electronically in ASCII format and is hereby incorporated by reference in its entirety. Said ASCII copy, created on Jul. 14, 2017, is named “AQT-Sequence-References.TXT” and is 3,451 bytes in size.

### BACKGROUND OF THE INVENTION

[0003] Protein kinases are involved in all aspects of regulation within cells. A protein kinase catalyzes the transfer of a phosphoryl group from adenosine triphosphate (ATP) to a serine, threonine or tyrosine residue in a peptide or protein sequence. Each kinase is specific for the amino acids surrounding the residue to be phosphorylated. The traditional method for assaying kinase activity is discontinuous and requires ³²P-labelled ATP, which requires special handling.

[0004] Many companies market specialized fluorescent kinase assay systems, all of which are discontinuous, requiring sampling of the reaction mixture or additional handling steps or use of antibodies to identify the product of the reaction or create the fluorescent signal (e.g., Promega. Thermo Fisher, Calbiochem. Cell Signaling Technology, Molecular Devices/Danaher, DiscoveRx. EMD-Millipore, PerkinElmer). A continuous fluorescent assay that can be performed in real time is of great utility. Currently, few examples of sensors capable of such assays exist. Approaches include: environment-sensitive fluorophores near the phosphorylation site (Wright, D. E. et al. Proc. Natl. Acad. Sci. USA 1981, 78, 6048-6050; Mcllroy, B. K. et al. Anal. Biochem. 1991, 195, 148-152; Higashi, H. et al. FEBS Lett. 1997, 414, 55-60; Post, P. L. et al. J. Biol. Chem. 1994, 269, 12880-12887), FRET pairs flanking a sequence which undergoes a conformational change upon phosphorylation (Nagai, Y. et al. Nat. Biotech. 2000, 18, 313-316; Ohuchi, Y. et al. Analyst 2000, 125, 1905-1907; Zhang, J. et al. Proc. Natl. Acad. Sci. USA 2001, 98, 14997-15002; Ting, A. Y. et al. Proc. Natl. Acad. Sci. USA 2001, 98, 15003-15008; Hofmann, R. M. et al. Bioorg. Med. Chem. Lett. 2001, 11, 3091-3094: Kurokawa, K. at el. J. Biol. Chem. 2001, 276, 31305-31310. Sato, M. et al. Nat. Biotech. 2002, 20, 287-294; Violin, J. D. et al. J. Cell Biol. 2003, 161, 899-909), or Ca²⁺ chelation between the phosphate and internal chelator causing disruption of PET-quenching (Chen, C.-A.; et al. J. Am. Chem. Soc. 2002, 124, 3840-3841). A majority of these sensors have very modest fluorescence increases or sometimes decreases, with the notable exception of 1.5-2.5-fold increases in the probes reported by Lawrence and coworkers (Chen 2002, supra; Yeh, R.-H.; et al. J. Biol. Chem. 2002, 277, 11527-11532; Wang, Q.; et al. J. Am. Chem. Soc. 2006, 128, 1808-1809). However, these types of probes, with fluorophores adjacent to the phosphorylated residue or using very large fluorophores, may interfere with their recognition by and reactivity with certain kinases.

### SUMMARY OF THE INVENTION

[0005] The present invention provides metal-binding analytical reagents that exhibit chelation-enhanced fluorescence (CHEF) upon binding to Mg²⁺. The present invention further provides methods of using the reagents for detecting the presence of or quantifying the activity of individual kinases or groups of kinases in a sample. The corresponding phosphopeptides can also be used as substrates to monitor the activity of protein phosphatases, where removal of the phosphate group on the targeted serine, threonine or tyrosine residue will result in a reduction in fluorescence.

### BRIEF DESCRIPTION OF THE FIGURES

[0006] FIG. 1 is a graph of soluble tyrosine kinase (Soluble-TK) activity.

[0007] FIG. 2 is a graph of receptor tyrosine kinase (RTK) activity.

[0008] FIG. 3 is a graph of receptor tyrosine kinase activity dramatic improvement in selectivity after 1 round of optimization.

[0009] FIG. 4 is a graph of screen of kinase activity with Omnia Y12 substrate.

[0010] FIG. 5 is a graph of receptor tyrosine kinase (RTK) activity.

[0011] FIG. 6 is a graph of receptor tyrosine kinase (RTK) activity.

[0012] FIG. 7 is a graph of receptor tyrosine kinase (RTK) activity.

[0013] FIG. 8 is a graph of receptor tyrosine kinase (RTK) activity.

[0014] FIG. 9 is a graph of receptor tyrosine kinase (RTK) activity.

[0015] FIG. 10 is a graph of receptor tyrosine kinase (RTK) activity.

[0016] FIG. 11 is a graph of receptor tyrosine kinase (RTK) activity.

[0017] FIG. 12 is a graph of receptor tyrosine kinase (RTK) activity.

[0018] FIG. 13 is a graph of receptor tyrosine kinase (RTK) activity.

[0019] FIG. 14 is a graph of soluble tyrosine kinase (Soluble-TK) activity.

[0020] FIG. 15 is a graph of soluble tyrosine kinase (Soluble-TK) activity.

[0021] FIG. 16 is a graph of soluble tyrosine kinase (Soluble-TK) activity.

[0022] FIG. 17 is a graph of soluble tyrosine kinase (Soluble-TK) activity.

[0023] FIG. 18 is a graph of soluble tyrosine kinase (Soluble-TK) activity.

[0024] FIG. 19 is a graph of soluble tyrosine kinase (Soluble-TK) activity.

[0025] FIG. 20 is a graph of soluble tyrosine kinase (Soluble-TK) activity.

[0026] FIG. 21 is a graph of soluble tyrosine kinase (Soluble-TK) activity.

[0027] FIG. 22 is a graph of tyrosine kinase activity for AQT0001 (Ac-EEEEYI-C(Sx)-IV-NH₂).

[0028] FIG. 23 is a chart of receptor tyrosine kinase (RTK) activity for AQT0001.

[0029] FIG. 24 is a chart of soluble tyrosine kinase (Soluble-TK) activity for AQT0001.

[0030] FIG. 25 is a graph of tyrosine kinase activity for AQT0032 (Ac-E-C(Sx)-IYAAPFAKKK-NH₂).

[0031] FIG. 26 is a chart of receptor tyrosine kinase (RTK) activity for AQT0032.

[0032] FIG. 27 is a chart of soluble tyrosine kinase (Soluble-TK) activity for AQT0032.

[0033] FIG. 28 is a graph of AGC Serine/Threonine kinase activity.

[0034] FIG. 29 is a graph of CMGC Serine/Threonine kinase activity.

[0035] FIG. 30 is a graph of CMGC Serine/Threonine kinase activity.

[0036] FIG. 31 is a graph of CMGC Serine/Threonine kinase activity.

[0037] FIG. 32 is a chart of AGC Serine/Threonine kinase activity for AQT0074 (Ac-ARKRERAYSF-C(Sx)-HHA-amide).

[0038] FIG. 33 is a chart of AKT1, 2 & 3 Serine/Threonine Kinase Activity Measured Using AQT's Panel of Substrates.

[0039] FIG. 34 is a chart of EGFR Substrate Optimization (Mutant EGFRs).

[0040] FIG. 35 is a chart of Broad AGC Serine/Threonine Kinase Activity Measured Using PKA-S4 Including SGK1/2/3 and PRKACA/B.

[0041] FIG. 36 is a chart of Substrates for SGK1, SGK2, SGK3 Identified from AQT's CSx Panel.

[0042] FIG. 37 is a chart FGFR Substrate Screening with Wild-type & Mutant FGFRs

### DETAILED DESCRIPTION OF THE INVENTION

[0043] The present invention provides metal-binding analytical reagents that are useful for detecting and quantifying kinase activities. The metal binding compounds of the invention are peptidyl sensors which include a metal-binding peptide of the present invention and at least one kinase recognition sequence comprising an amino acid (e.g., serine, threonine, or tyrosine) that can be phosphorylated in the presence of a kinase.

[0044] The present invention provides superior Sox-based substrates by allowing for flanking sequence recognition determinants on either side of the Sox moiety/phosphorylation site. This approach is used to generate both highly-generic substrates (for use with a range of purified kinases) or highly-selective substrates (for use with unfractionated cell or tissue lysates).

[0045] U.S. Pat. No. 7,262,282 (incorporated by reference) discloses linear Sox peptide sensors that include a metal binding amino acid residue and a kinase recognition sequence with a hydroxyamino acid that can be phosphorylated in the presence of a kinase. The metal-binding amino acid residue is located on either side (N-terminally or C-terminally) of the hydroxyamino acid and is preferably separated from that recognition sequence by an amino acid or peptide that is capable of assuming a β-turn conformation (“a β-turn sequence”). In some cases, the β-turn sequence is separated from the hydroxyamino acid by one or more amino acids.

[0046] U.S. Pat. No. 7,964,729 (incorporated by reference) discloses metal binding compounds that exhibit chelation-enhanced fluorescence (CHEF) upon binding to Mg²⁺. This patent further provides peptidyl sensors which include a metal-binding component and at least one kinase recognition sequence with a hydroxyamino acid that can be phosphorylated by the kinase. The peptide sensors may also be used to detect sulfation of hydroxyamino acids.

### Definitions

[0047] The term “hydroxyl” or “hydroxy” means the —OH group.

[0048] The term “amino” means the —NR′R″ group, where R′ and R″ are each independently hydrogen or alkyl.

[0049] The term “halogen” means a chlorine, bromine, iodine, or fluorine atom.

[0050] The term “alkyl” means a hydrocarbon group that may be linear, cyclic, or branched or a combination thereof having the number of carbon atoms designated (i.e., C₁₋₈ means one to eight carbon atoms). Examples of alkyl groups include methyl, ethyl, n-propyl, isopropyl, n-butyl, t-butyl, isobutyl, sec-butyl, cyclohexyl, cyclopentyl, (cyclohexyl)methyl, cyclopropylmethyl, bicyclo[2.2.1]heptane, bicyclo[2.2.2]octane, etc. Alkyl groups can be substituted or unsubstituted, unless otherwise indicated. Examples of substituted alkyl groups include haloalkyl, thioalkyl, aminoalkyl, and the like.

[0051] The term “substituent” means an atom or a group that replaces another atom or group in a molecule.

[0052] The term “N-terminal protecting group” refers to a group that prevents undesirable reaction of the amino functional group during subsequent transformations, and includes, but is not limited to, benzyl, substituted benzyl, benzyloxycarbonyl (Cbz), tert-butoxycarbonyl (Boc), 9-fluorenylmethoxycarbonyl (Fmoc), trityl, N-veratyloxycarbonyl (N-Voc), N-allyloxycarbonyl (N-Alloc) and N-pentenoyl (N-Pent).

[0053] The term “C-terminal protecting group” refers to a group that prevents undesirable reaction of the carboxyl functional group and includes, but is not limited to, C₁₋₁₂ alkyl (e.g., tert-butyl) and C₁₋₁₂ haloalkyl.

[0054] The term “chelation-enhanced fluorescence (CHEF)” means fluorescence enhancement of a compound as a result of metal ion binding (chelation) to that compound.

[0055] The term “capping group” means a chemical group connected to the N- or C-terminus of a peptide to prevent the peptide from degrading or being otherwise inappropriately modified.

[chemical structure]

[0056] C(Sx) represents an amino acid of formula (I), (II) or (III) as described below. C-Sox is a species of C(Sx).

GENETIC CODE

| | |
|---|---|
| Alanine (Ala, A) | GCA, GCC, GCG, GCT |
| Arginine (Arg, R) | AGA, ACG, CGA, CGC, CGG, CGT |
| Asparagine (Asn, N) | AAC, AAT |
| Aspartic acid (Asp, D) | GAC, GAT |
| Cysteine (Cys, C) | TGC, TGT |
| Glutamic acid (Glu, E) | GAA, GAG |
| Glutamine (Gln, Q) | CAA, CAG |
| Glycine (Gly, G) | GGA, GGC, GGG, GGT |
| Histidine (His, H) | CAC, CAT |
| Isoleucine (Ile, I) | ATA, ATC, ATT |
| Leucine (Leu, L) | CTA, CTC, CTG, CTT, TTA, TTG |
| Lysine (Lys, K) | AAA, AAG |
| Methionine (Met, M) | ATG |
| Phenylalanine (Phe, F) | TTC, TTT |
| Proline (Pro, P) | CCA, CCC, CCG, CCT |
| Serine (Ser, S) | AGC, AGT, TCA, TCC, TCG, TCT |
| Threonine (Thr, T) | ACA, ACC, ACG, ACT |
| Tryptophan (Trp, W) | TGG |
| Tyrosine (Tyr, Y) | TAC, TAT |
| Valine (Val, V) | GTA, GTC, GTG, GTT |
| Termination signal (end) | TAA, TAG, TGA |

S* represents S or (phospho)S; and
T* represents T or (phospho)T; and
Y* represents Y or (phospho)Y; and

### Compounds

[0057] The compounds of the present invention contain a metal binding moiety, referred to as the metal binding peptide, which comprises a metal-binding amino acid residue. In some embodiments, the compounds of the invention are oligopeptide comprising a fluorophore; and a (phospho)S, a (phospho)T, or a (phospho)Y residue at the +2 or −2 position relative to the fluorophore. In some embodiments, the position may be the +3 or −3 position. In some embodiments, a (phospho)S, a (phospho)T, or a (phospho)Y residue may be used at a certain position to facilitate kinase recognition and phosphorylation of the target amino acid (i.e., phospho-primed substrates).

[0058] In some embodiments, the metal-binding compound of the present invention is selected from the group consisting of: X-EEEEY*I-C(Sx)-IV-Z (SEQ ID NO: 1); X-EEEY*I-C(Sx)-IV-Z (SEQ ID NO: 2), X-EEY*I-C(Sx)-IV-Z (SEQ ID NO: 3), X-EY*I-C(Sx)-IV-Z (SEQ ID NO: 4), X-Y*I-C(Sx)-IV-Z (SEQ ID NO: 5), X-EEEEY*I-C(Sx)-I-Z (SEQ ID NO: 6), X-EEEY*I-C(Sx)-I-Z (SEQ ID NO: 7), X-EEEEY*I-C(Sx)-Z (SEQ ID NO: 8), X-EEY*I-C(Sx)-I-Z (SEQ ID NO: 9), X-EY*I-C(Sx)-I-Z (SEQ ID NO: 10), X-Y*I-C(Sx)-I-Z (SEQ ID NO: 11), X-EEEY*I-C(Sx)-Z (SEQ ID NO: 12), X-EEY*I-C(Sx)-Z (SEQ ID NO: 13), X-EY*I-C(Sx)-Z (SEQ ID NO: 14), and X-Y*I-C(Sx)-Z (SEQ ID NO: 15); wherein X is H or acetyl; and Z is OH or NH2.

[0059] In some embodiments, the metal-binding compound of the present invention is selected from the group consisting of: X-EEEIY*F-C(Sx)-dP-(2-Nal)-G-Z (SEQ ID NO: 16), X-EEEIY*F-C(Sx)-Z (SEQ ID NO: 17), X-EEIY*F-C(Sx)-Z (SEQ ID NO: 18), X-EIY*F-C(Sx)-Z (SEQ ID NO: 19), X-IY*F-C(Sx)-Z (SEQ ID NO: 20), X-Y*F-C(Sx)-Z (SEQ ID NO: 21), X-EEEEY*I-C(Sx)-dP-(2-Nal)-G-Z (SEQ ID NO: 22), X-EEEEY*I-C(Sx)-VG-Z (SEQ ID NO: 23), X-DPQEY*I-C(Sx)-LP-Z (SEQ ID NO: 24), X-EDEDY*E-C(Sx)-VG-Z (SEQ ID NO: 25), X-EAEAIY*A-C(Sx)-dP-(2-Nal)-G-Z (SEQ ID NO: 26), X-EAEAIY*A-C(Sx)-PF-Z (SEQ ID NO: 27), X-EAEAIY*A-C(Sx)-P-Z (SEQ ID NO: 28), X-EAEAIY*A-C(Sx)-Z (SEQ ID NO: 29), X-EEPIY*I-C(Sx)-VP-Z (SEQ ID NO: 30), X-DEQIY*W-C(Sx)-IA-Z (SEQ ID NO: 31), X-KKGEAIY*A-C(Sx)-dP-(2-Nal)-G-Z (SEQ ID NO: 32), X-KKGEAIY*A-C(Sx)-PFAKKK-Z (SEQ ID NO: 33), X-KKGE-C(Sx)-IY*AAPFAKKK-Z (SEQ ID NO: 34), X-E-C(Sx)-IY*AAPF-Z (SEQ ID NO: 35), X-E-C(Sx)-IY*A-Z (SEQ ID NO: 36), X-E-C(Sx)-IY*-Z (SEQ ID NO: 37), X-C(Sx)-IY*-Z (SEQ ID NO: 38), X-KKGEAIY*A-C(Sx)-PF-Z (SEQ ID NO: 39), X-PE-C(Sx)-IY*ATPG-Z (SEQ ID NO: 40), and X-PEVIY*A-C(Sx)-PG-Z (SEQ ID NO: 41); X-GAEEPIY*I-C(Sx)-VPAKKKG-Z (SEQ ID NO: 42) wherein X is H or acetyl; and Z is OH or NH2.

[0060] In some embodiments, the metal-binding compound of the present invention is selected from the group consisting of: X-KKKKEEIY*F-C(Sx)-Z (SEQ ID NO: 43), X-AEE-C(Sx)-IY*GELEA-Z (SEQ ID NO: 44), X-EE-C(Sx)-IY*GIFG-Z (SEQ ID NO: 45), X-C(Sx)-IY*ETDYYRKG-Z (SEQ ID NO: 46), X-EEEEY*I-C(Sx)-DYYRKG-Z (SEQ ID NO: 47), X-ELEDDY*E-C(Sx)-Z (SEQ ID NO: 48), X-EE-C(Sx)-DY*VEFKKK-Z (SEQ ID NO: 49), X-EEEEY*I-C(Sx)-FKKK-Z (SEQ ID NO: 50), X-RRRRRRSETDDY*A-C(Sx)-IIDEEDT-Z (SEQ ID NO: 51), X-RAFIY*A-C(Sx)-IP-Z (SEQ ID NO: 52), X-DDEPIY*A-C(Sx)-LADIT-Z (SEQ ID NO: 53), X-C(Sx)-IY*GVIE-Z (SEQ ID NO: 54), X-EEE-C(Sx)-AY*GWLDF-Z (SEQ ID NO: 55), X-C(Sx)-EY*VNIEFG-Z (SEQ ID NO: 56), X-GEEPLY*W-C(Sx)-FPAKKK-Z (SEQ ID NO: 57), X-ESSDDY*V-C(Sx)-Z (SEQ ID NO: 58), and X-RAHEEIY*H-C(Sx)-Z (SEQ ID NO: 59); wherein X is H or acetyl; and Z is OH or NH2.

[0061] In some embodiments, the metal-binding compound of the present invention is selected from the group consisting of: X-VYS-C(Sx)-DY*[pY]RLFNPS-Z (SEQ ID NO: 60), X-DE-C(Sx)-DY*[pY]EIP-Z (SEQ ID NO: 61), X-PD-C(Sx)-QY*[pY]NDF-Z (SEQ ID NO: 62), X-GAGEE-C(Sx)-DY*[pY][pY]IWAGKK-Z (SEQ ID NO: 63), and X-GEE-C(Sx)-DY*[pY][pY]IWA-Z (SEQ ID NO: 64); wherein X is H or acetyl; and Z is OH or NH2.

[0062] In some embodiments, the metal-binding compound of the present invention is selected from the group consisting of: X-EEEEY*F-C(Sx)-LV-Z (SEQ ID NO: 65), X-GADPQEY*I-C(Sx)-LPAKKKG-Z (SEQ ID NO: 66), X-GAEDEDY*E-C(Sx)-VGAKKKG-Z (SEQ ID NO: 67), X-GAEEPIY*I-C(Sx)-VPAKKKG-Z (SEQ ID NO: 42), X-GADEQIY*W-C(Sx)-IAAKKKG-Z (SEQ ID NO: 68), X-GAPE-C(Sx)-IY*ATPGAKKK-Z (SEQ ID NO: 69), and X-GAPEVIY*A-C(Sx)-PGAKKK-Z (SEQ ID NO: 70); wherein X is H or acetyl; and Z is OH or NH2.

[0063] In some embodiments, the metal-binding compound of the present invention is selected from the group consisting of: X-GAEE-C(Sx)-IY*GIFGAKKKG-Z (SEQ ID NO: 71), X-C(Sx)-DY*VEFKKK-Z (SEQ ID NO: 72), X-RRRRRRSETDDY*A-C(Sx)-IID-Z (SEQ ID NO: 73), X-RRRRRRSET-C(Sx)-DY*AEIID-Z (SEQ ID NO: 74), and X-GARAFIY*A-C(Sx)-IPAKKKG-Z (SEQ ID NO: 75); wherein X is H or acetyl; and Z is OH or NH2.

[0064] In some embodiments, the metal-binding compound of the present invention is selected from the group consisting of: X-VYS-C(Sx)-DY*YRLFNPS-Z (SEQ ID NO: 76), X-A-C(Sx)-EY*LIPQQ-Z (SEQ ID NO: 77), X-DE-C(Sx)-DY*YEIP-Z (SEQ ID NO: 78), X-PD-C(Sx)-QY*YNDF-Z (SEQ ID NO: 79), X-EGDEDGIY*V-C(Sx)-FEPKT-Z (SEQ ID NO: 80), X-EGDED-C(Sx)-IY*VNFEPKT-Z (SEQ ID NO: 81), X-PAAENPEY*L-C(Sx)-QQDPV-Z (SEQ ID NO: 82), X-PAAEN-C(Sx)-EY*LWQQDPV-Z (SEQ ID NO: 83), X-IYS-C(Sx)-DY*YR-Z (SEQ ID NO: 84), X-KGGEE-C(Sx)-EY*FELVKK-Z (SEQ ID NO: 85), X-KGGEEEEY*F-C(Sx)-LVKK-Z (SEQ ID NO: 86), X-KVEKIGE-C(Sx)-TY*GVVYK-Z (SEQ ID NO: 87), X-RRLIEDNEY*T-C(Sx)-RG-Z (SEQ ID NO: 88), X-RRLIEDAEY*A-C(Sx)-RG-Z (SEQ ID NO: 89), X-EF-C(Sx)-IY*DFLPAKKK-Z (SEQ ID NO: 90), X-EFPIY*D-C(Sx)-LPAKKK-Z (SEQ ID NO: 91), X-GEE-C(Sx)-LY*WSFPAKKK-Z (SEQ ID NO: 92), X-GEEPLY*W-C(Sx)-FPAKKK-Z (SEQ ID NO: 57), X-E-C(Sx)-LY*WSFPA-Z (SEQ ID NO: 93), X-EPLY*W-C(Sx)-FPA-Z (SEQ ID NO: 94), and X-C(Sx)-IY*GSFK-Z (SEQ ID NO: 95), X-KKKKEEIY*F-C(Sx)-FG-Z (SEQ ID NO: 96), X-KKKKEEIY*F-C(Sx)-FG-Z (SEQ ID NO: 96); wherein X is H or acetyl; and Z is OH or NH2.

[0065] In some embodiments, the metal-binding compound of the present invention is selected from the group consisting of: X-ETSK-C(Sx)-IY*DFIEK-Z (SEQ ID NO: 97), and X-ETSKVIY*D-C(Sx)-IEK-Z (SEQ ID NO: 98); wherein X is H or acetyl; and Z is OH or NH2.

[0066] In some embodiments, the metal-binding compound of the present invention is selected from the group consisting of: X-ARKRERTY*SF-C(Sx)-HH-Z (SEQ ID NO: 99), X-VP-C(Sx)-LS*PGPF-Z (SEQ ID NO: 100), X-C(Sx)-LS*PGPF-Z (SEQ ID NO: 101), X-C(Sx)-RT*PGGRR-Z (SEQ ID NO: 102), and X-C(Sx)-GT*PSGEAPNQALLR-Z (SEQ ID NO: 103); wherein X is H or acetyl; and Z is OH or NH2.

[0067] In some embodiments, the metal-binding compound of the present invention is selected from the group consisting of: X-VLTQMGSPSI-C(Sx)-SS*[pS]VS-Z (SEQ ID NO: 104), X-ESTSAPLS*P-C(Sx)-VTTSP-Z (SEQ ID NO: 105), X-GFLSRPLS*P-C(Sx)-FTTSP-Z (SEQ ID NO: 106), X-PSLLRPLS*P-C(Sx)-FFGAY-Z (SEQ ID NO: 107), X-STPSSPSS*P-C(Sx)-SSVAY-Z (SEQ ID NO: 108), X-SHGSAPLS*P-C(Sx)-APLTS-Z (SEQ ID NO: 109), X-SPFSVLSS*P-C(Sx)-SGHSN-Z (SEQ ID NO: 110), X-ALKLVRYPS*F-C(Sx)-IT-Z (SEQ ID NO: 111), X-ALKLSRYPS*F-C(Sx)-I-Z (SEQ ID NO: 112), X-RKKFGEREKT*K-C(Sx)-RIRL-Z (SEQ ID NO: 113), X-DYMR-C(Sx)-SS*RRRIRMAHQT-Z (SEQ ID NO: 114), X-DYMSAR-C(Sx)-SS*RRRIRHQT-Z (SEQ ID NO: 115), X-AHLQR-C(Sx)-LS*FRRR-Z (SEQ ID NO: 116), X-GRTGR-C(Sx)-NS*FRRR-Z (SEQ ID NO: 117), X-ALKLSR-C(Sx)-PS*FRRR-Z (SEQ ID NO: 118), X-RKRDR-C(Sx)-GT*FRRR-Z (SEQ ID NO: 119), and X-ARKRER-C(Sx)-YS*FRRR-Z (SEQ ID NO: 120); wherein X is H or acetyl; and Z is OH or NH2.

[0068] In some embodiments, the metal-binding compound of the present invention is selected from the group consisting of: X-HMRSAMS*V-C(Sx)-HLVK-Z (SEQ ID NO: 121), X-HMRSSMS*V-C(Sx)-HLVKRR-Z (SEQ ID NO: 122), X-HMRSSMS*V-C(Sx)-HLVK-Z (SEQ ID NO: 123), X-HMRSAMS*V-C(Sx)-HLV-Z (SEQ ID NO: 124), X-LRRAS*L-C(Sx)-Z (SEQ ID NO: 125), X-RRREEEEES*A-(cSx)-AA-Z (SEQ ID NO: 126), X-LSNLYHQGKFLQT*F-C(Sx)-GSPLY-Z (SEQ ID NO: 127), X-QGKF-C(Sx)-QT*FSGSPLYRRR-Z (SEQ ID NO: 128), X-KKRNRRLS*V-C(Sx)-Z (SEQ ID NO: 129), and X-AKRRRLAS*L-C(Sx)ASTSK-Z (SEQ ID NO: 130); wherein X is H or acetyl; and Z is OH or NH2.

[0069] In some embodiments, the metal-binding compound of the present invention is selected from the group consisting of: X-GRPRAAT*F-C(Sx)-EG-Z (SEQ ID NO: 131), X-GRP-MeArg-AFT*F-C(Sx)-EG-Z (SEQ ID NO: 132), X-GRP-MeArg-C(Sx)-FT*F-Sarc-EG-Z (SEQ ID NO: 133), X-RPRAAT*F-C(Sx)-Z (SEQ ID NO: 134), X-RPRAAT*F-C(Sx)-HHA-Z (SEQ ID NO: 135), X-FFKKIVTPRT*P-C(Sx)-P-Z (SEQ ID NO: 136), X-FFKNIVTPRT*P-C(Sx)-PSQGK-Z (SEQ ID NO: 137), and X-APRT*P-C(Sx)-GRR-Z (SEQ ID NO: 138); wherein X is H or acetyl; and Z is OH or NH2.

[0070] In some embodiments, the metal-binding compound of the present invention is selected from the group consisting of: X-KKKVLTQMGSPSIR-C(Sx)-SS*VS-Z (SEQ ID NO: 139), X-KKKVLTQMGSPSI-C(Sx)-SS*[pS]VS-Z (SEQ ID NO: 140), X-SGRSRRKS*P-C(Sx)-PSPHP-Z (SEQ ID NO: 141), X-SGRSR-C(Sx)-KS*PRPSPHP-Z (SEQ ID NO: 142), X-SGRSR-C(Sx)-KS*VRRSPHP-Z (SEQ ID NO: 143), X-KKLNRTLS*F-C(Sx)-EPG-Z (SEQ ID NO: 144), X-KKRPQRATS*N-C(Sx)-FAM-Z (SEQ ID NO: 145), X-RGRSRRDS*F-C(Sx)-VSPHY-Z (SEQ ID NO: 146), X-RKRSRRKS*F-C(Sx)-VLSSL-Z (SEQ ID NO: 147), X-AKRRRLSSLRASTSK-C(Sx)-ES*SQK-Z (SEQ ID NO: 148), X-AKRRRLSSLRASTSKSES*S-C(Sx)-K-Z (SEQ ID NO: 149), X-KMQPPR-C(Sx)-RS*SIMSIT-Z (SEQ ID NO: 150), X-KMQPPRSRS*S-C(Sx)-MSIT-Z (SEQ ID NO: 151), X-SGRSRPLS*P-C(Sx)-PSPHY-Z (SEQ ID NO: 152), X-LIDS*M-C(Sx)-NSFVG-Z (SEQ ID NO: 153), X-LIDSM-C(Sx)-NS*FVG-Z (SEQ ID NO: 154), X-PKRSR-C(Sx)-SS*YPNGHRD-Z (SEQ ID NO: 155), X-PKRSRSSS*V-C(Sx)-PSHSY-Z (SEQ ID NO: 156), X-SGLEDDDY*V-C(Sx)-PGGHW-Z (SEQ ID NO: 157), X-ALKLVRYPS*F-C(Sx)-ITAKKK-Z (SEQ ID NO: 158), X-AMRLERQDS*I-C(Sx)-YPKKK-Z (SEQ ID NO: 159), X-KKKVSRSGLYRSPS*M-C(Sx)-ENLNRPR-Z (SEQ ID NO: 160), X-KKVSRSGLYRSPS*M-C(Sx)-E-Z (SEQ ID NO: 161), X-KKVSRSGLYR-C(Sx)-PS*MPE-Z (SEQ ID NO: 162), X-GRPRTSS*F-C(Sx)-EPG-Z (SEQ ID NO: 163), X-LRREILS*R-C(Sx)-PSYRK-Z (SEQ ID NO: 164), X-LRREILSR-C(Sx)-PS*YRK-Z (SEQ ID NO: 165), X-LRRE-C(Sx)-LS*RRPSYRK-Z (SEQ ID NO: 166), X-LRREILSRRPS*Y-C(Sx)-K-Z (SEQ ID NO: 167), X-FQREGFGRQS*M-C(Sx)-EKR-Z (SEQ ID NO: 168), X-FQREGFG-C(Sx)-QS*MSEKR-Z (SEQ ID NO: 169), X-RS*R-C(Sx)-RSRSRSRSRSR-Z (SEQ ID NO: 170), X-RSR-C(Sx)-RS*RSRSRSRSR-Z (SEQ ID NO: 171), X-RSRSRS*R-C(Sx)-RSRSRSR-Z (SEQ ID NO: 172), X-RSRSRSR-C(Sx)-RS*RSRSR-Z (SEQ ID NO: 173), X-RSRSRSRSRS*R-C(Sx)-RSR-Z (SEQ ID NO: 174), X-RSRSRSRSRSR-C(Sx)-RS*R-Z (SEQ ID NO: 175), X-ILLSELS*R-C(Sx)-RIR-Z (SEQ ID NO: 176), X-ILLSESS*R-C(Sx)-RIR-Z (SEQ ID NO: 177), X-ILLR-C(Sx)-SS*RRIRR-Z (SEQ ID NO: 178), X-ILLS-C(Sx)-SS*RRRIRSGNKLGRIGRN-Z (SEQ ID NO: 179), X-ILLS-C(Sx)-SS*RRRIRSGNKLGRIGRN-Z (SEQ ID NO: 179), X-GKRGD-C(Sx)-KS*VSRSSSS-Z (SEQ ID NO: 180), X-SGRSR-C(Sx)-DS*PRPGTHK-Z (SEQ ID NO: 181), X-SKRSR-C(Sx)-KS*PRRSLSY-Z (SEQ ID NO: 182), X-R-C(Sx)-LS*FRRR-Z (SEQ ID NO: 183), X-PLSRT*L-C(Sx)-VAAKK-Z (SEQ ID NO: 184), X-KKKKK-C(Sx)-FS*FKKSFKLSGFSFKKNKK-Z (SEQ ID NO: 185), X-KKKKKRFS*F-C(Sx)-KSFKLSGFSFKKNKK-Z (SEQ ID NO: 186), X-KKKKKRFSF-C(Sx)-KS*FKLSGFSFKKNKK-Z (SEQ ID NO: 187), X-KKKKKRFSFKKS*F-C(Sx)-LSGFSFKKNKK-Z (SEQ ID NO: 188), X-KKKKKRFSFKKSF-C(Sx)-LS*GFSFKKNKK-Z (SEQ ID NO: 189), X-KKKKKRFSFKKSFKLSGFS*F-C(Sx)-KNKK-Z (SEQ ID NO: 190), X-KGTLVQTKGTGASGS*F-C(Sx)-LNKK-Z (SEQ ID NO: 191), X-RRR-C(Sx)-SS*LRA-Z (SEQ ID NO: 192), X-RR-C(Sx)-SS*LRA-Z (SEQ ID NO: 193), X-RRLSS*L-C(Sx)-A-Z (SEQ ID NO: 194), X-RT-C(Sx)-RS*GSVYEPLKI-Z (SEQ ID NO: 195), X-RFAVRDMRQT*V-C(Sx)-VGVIKAVDKK-Z (SEQ ID NO: 196), X-AAKI-C(Sx)-AS*FRGHMARKK-Z (SEQ ID NO: 197), X-RR-C(Sx)-RT*GRGRRGIFR-Z (SEQ ID NO: 198), X-QK-C(Sx)-PS*QRSKYL-Z (SEQ ID NO: 199), X-STASQDVANRFARKGS*L-C(Sx)-QKNV-Z (SEQ ID NO: 200), X-MFAVRDRRQT*V-C(Sx)-KGVIKAVDAV-Z (SEQ ID NO: 201), X-RLGRDK-C(Sx)-KT*LRQIRQ-Z (SEQ ID NO: 202), X-RLGRDKYKT*L-C(Sx)-QIRQ-Z (SEQ ID NO: 203), X-ERMRPRKRQGS*V-C(Sx)RRV-Z (SEQ ID NO: 204), X-HAT*P-C(Sx)-KKKRK-Z (SEQ ID NO: 205), X-GGG-C(Sx)-AT*PKKAKKL-Z (SEQ ID NO: 206), X-C(Sx)-QS*PKKG-Z (SEQ ID NO: 207), X-RRRFRPAS*P-C(Sx)-RGPPK-Z (SEQ ID NO: 208), X-RRRFRPAS*P-C(Sx)-RGPPK-Z (SEQ ID NO: 208), X-IPTS*P-C(Sx)-TITYFFF-Z (SEQ ID NO: 209), X-I-C(Sx)-TS*PITITYFFF-Z (SEQ ID NO: 210), X-IPTS*P-C(Sx)-TITYFFFKKK-Z (SEQ ID NO: 211), X-C(Sx)-KT*PKKAKKL-Z (SEQ ID NO: 212), and X-GGG-C(Sx)-AT*PKKAKKL-Z (SEQ ID NO: 206); wherein X is H or acetyl; and Z is OH or NH2.

[0071] In some embodiments, the metal-binding compound of the present invention is selected from the group consisting of: X-HMRSAMS*G-C(Sx)-HLVKRR-Z (SEQ ID NO: 213), X-HMRS-C(Sx)-MS*GLHLVKRR-Z (SEQ ID NO: 214), X-AMARAAS*A-C(Sx)-ALARRR-Z (SEQ ID NO: 215), X-KKKALSRQFS*V-C(Sx)-Z (SEQ ID NO: 216), X-GRTGRRNS*I-C(Sx)-Z (SEQ ID NO: 217), X-FLAKRRRLSS*L-C(Sx)-A-Z (SEQ ID NO: 218), X-KKRNRTLT*V-C(Sx)-Z (SEQ ID NO: 219), X-C(Sx)-FS*LRRKAK-Z (SEQ ID NO: 220), X-KEIYNT*I-C(Sx)-Z (SEQ ID NO: 221), X-RKIS*A-C(Sx)-EFDRPLR-Z (SEQ ID NO: 222), X-R-C(Sx)-IS*ASEFDRPLR-Z (SEQ ID NO: 223), X-RKIS*A-C(Sx)-EFDRPLR-Z (SEQ ID NO: 222), X-RKRS*R-C(Sx)-E-Z (SEQ ID NO: 224), X-RARTLS*F-C(Sx)-EPG-Z (SEQ ID NO: 225), X-KRRE-C(Sx)-LS*RRP[pS]YR-Z (SEQ ID NO: 226), X-RRAAEE-C(Sx)-DS*RAG[pS]PQL-Z (SEQ ID NO: 227), X-RYR-C(Sx)-PT*GMYY-Z (SEQ ID NO: 228), X-RYRHPT*R-C(Sx)-YY-Z (SEQ ID NO: 229), X-KPDRKKRY*TV-C(Sx)-GNPY-Z (SEQ ID NO: 230), X-RRRLS*F-C(Sx)-EPG-Z (SEQ ID NO: 231), X-PL-C(Sx)-RT*LSVAGLPGKK-Z (SEQ ID NO: 232), X-KKLNRT*L-C(Sx)-VA-Z (SEQ ID NO: 233), X-KKALRRQET*V-C(Sx)-AL-Z (SEQ ID NO: 234), X-LSNLYHQGKFLQT*F-C(Sx)-GSPLYRRR-Z (SEQ ID NO: 235), X-RISDELMDAT*F-C(Sx)-DQEAK-Z (SEQ ID NO: 236), X-DELMEFS*F-C(Sx)-DQEAKV-Z (SEQ ID NO: 237), X-SGEDT*L-C(Sx)-DSDDED-Z (SEQ ID NO: 238), X-GRHD[pS]GLDS*M-C(Sx)-Z (SEQ ID NO: 239), X-KRRRALS[pS]VAS*L-C(Sx)-Z (SEQ ID NO: 240), X-RRKDLHDDEEDEAMS*I-C(Sx)-A-Z (SEQ ID NO: 241), X-RRA-C(Sx)-DS*DDDDD-Z (SEQ ID NO: 242), X-LGKEF-C(Sx)-RS*YRLRYSRDGRR-Z (SEQ ID NO: 243), X-LGKEFSRS*Y-C(Sx)LRYSRDGRR-Z (SEQ ID NO: 244), X-GRPRTSS*F-C(Sx)-EG-Z (SEQ ID NO: 245), X-PRTSS*F-C(Sx)-E-Z (SEQ ID NO: 246), X-KRRRLAS*L-C(Sx)-A-Z (SEQ ID NO: 247), X-KKRNRTLS*V-C(Sx)-Z (SEQ ID NO: 248), X-RKKFGES-C(Sx)-KT*KTKEFL-Z (SEQ ID NO: 249), and X-RKKFGESEKT*K-C(Sx)-KEFL-Z (SEQ ID NO: 250); wherein X is H or acetyl; and Z is OH or NH2.

[0072] In some embodiments, the metal-binding compound of the present invention is selected from the group consisting of: X-EDPDY*F-C(Sx)-FG-Z (SEQ ID NO: 251), X-EDPDY*F-C(Sx)-FK-Z (SEQ ID NO: 252), X-EDPDY*F-C(Sx)-FP-Z (SEQ ID NO: 253), X-EDPDY*F-C(Sx)-IG-Z (SEQ ID NO: 254), X-EDPDY*F-C(Sx)-IK-Z (SEQ ID NO: 255), X-EDPDY*F-C(Sx)-IP-Z (SEQ ID NO: 256), X-EDPDY*F-C(Sx)-MG-Z (SEQ ID NO: 257), X-EDPDY*F-C(Sx)-MK-Z (SEQ ID NO: 258), X-EDPDY*F-C(Sx)-MP-Z (SEQ ID NO: 259), X-EDPDY*F-C(Sx)-VG-Z (SEQ ID NO: 260), X-EDPDY*F-C(Sx)-VK-Z (SEQ ID NO: 261), and X-EDPDY*F-C(Sx)-VP-Z (SEQ ID NO: 262); wherein X is H or acetyl; and Z is OH or NH2.

[0073] In some embodiments, the metal-binding compound of the present invention is selected from the group consisting of: X-EDPDY*I-C(Sx)-FG-Z (SEQ ID NO: 263), X-EDPDY*I-C(Sx)-FK-Z (SEQ ID NO: 264), X-EDPDY*I-C(Sx)-FP-Z (SEQ ID NO: 265), X-EDPDY*I-C(Sx)-IG-Z (SEQ ID NO: 266), X-EDPDY*I-C(Sx)-IK-Z (SEQ ID NO: 267), X-EDPDY*I-C(Sx)-IP-Z (SEQ ID NO: 268), X-EDPDY*I-C(Sx)-MG-Z (SEQ ID NO: 269), X-EDPDY*I-C(Sx)-MK-Z (SEQ ID NO: 270), X-EDPDY*I-C(Sx)-MP-Z (SEQ ID NO: 271), X-EDPDY*I-C(Sx)-VG-Z (SEQ ID NO: 272), X-EDPDY*I-C(Sx)-VK-Z (SEQ ID NO: 273), and X-EDPDY*I-C(Sx)-VP-Z (SEQ ID NO: 274); wherein X is H or acetyl; and Z is OH or NH2.

[0074] In some embodiments, the metal-binding compound of the present invention is selected from the group consisting of: X-EDPDY*V-C(Sx)-FG-Z (SEQ ID NO: 275), X-EDPDY*V-C(Sx)-FK-Z (SEQ ID NO: 276), X-EDPDY*V-C(Sx)-FP-Z (SEQ ID NO: 277), X-EDPDY*V-C(Sx)-IG-Z (SEQ ID NO: 278), X-EDPDY*V-C(Sx)-IK-Z (SEQ ID NO: 279), X-EDPDY*V-C(Sx)-IP-Z (SEQ ID NO: 280), X-EDPDY*V-C(Sx)-MG-Z (SEQ ID NO: 281), X-EDPDY*V-C(Sx)-MK-Z (SEQ ID NO: 282), X-EDPDY*V-C(Sx)-MP-Z (SEQ ID NO: 283), X-EDPDY*V-C(Sx)-VG-Z (SEQ ID NO: 284), X-EDPDY*V-C(Sx)-VK-Z (SEQ ID NO: 285), and X-EDPDY*V-C(Sx)-VP-Z (SEQ ID NO: 286); wherein X is H or acetyl; and Z is OH or NH2.

[0075] In some embodiments, the metal-binding compound of the present invention is selected from the group consisting of: X-EDPEY*F-C(Sx)-FG-Z (SEQ ID NO: 287), X-EDPEY*F-C(Sx)-FK-Z (SEQ ID NO: 288), X-EDPEY*F-C(Sx)-FP-Z (SEQ ID NO: 289), X-EDPEY*F-C(Sx)-IG-Z (SEQ ID NO: 290), X-EDPEY*F-C(Sx)-IK-Z (SEQ ID NO: 291), X-EDPEY*F-C(Sx)-IP-Z (SEQ ID NO: 292), X-EDPEY*F-C(Sx)-MG-Z (SEQ ID NO: 293), X-EDPEY*F-C(Sx)-MK-Z (SEQ ID NO: 294), X-EDPEY*F-C(Sx)-MP-Z (SEQ ID NO: 295), X-EDPEY*F-C(Sx)-VG-Z (SEQ ID NO: 296), X-EDPEY*F-C(Sx)-VK-Z (SEQ ID NO: 297), and X-EDPEY*F-C(Sx)-VP-Z (SEQ ID NO: 298); wherein X is H or acetyl; and Z is OH or NH2.

[0076] In some embodiments, the metal-binding compound of the present invention is selected from the group consisting of: X-EDPEY*I-C(Sx)-FG-Z (SEQ ID NO: 299), X-EDPEY*I-C(Sx)-FK-Z (SEQ ID NO: 300), X-EDPEY*I-C(Sx)-FP-Z (SEQ ID NO: 301), X-EDPEY*I-C(Sx)-IG-Z (SEQ ID NO: 302), X-EDPEY*I-C(Sx)-IK-Z (SEQ ID NO: 303), X-EDPEY*I-C(Sx)-IP-Z (SEQ ID NO: 304), X-EDPEY*I-C(Sx)-MG-Z (SEQ ID NO: 305), X-EDPEY*I-C(Sx)-MK-Z (SEQ ID NO: 306), X-EDPEY*I-C(Sx)-MP-Z (SEQ ID NO: 307), X-EDPEY*I-C(Sx)-VG-Z (SEQ ID NO: 308), X-EDPEY*I-C(Sx)-VK-Z (SEQ ID NO: 309), and X-EDPEY*I-C(Sx)-VP-Z (SEQ ID NO: 310); wherein X is H or acetyl; and Z is OH or NH2.

[0077] In some embodiments, the metal-binding compound of the present invention is selected from the group consisting of: X-EDPEY*V-C(Sx)-FG-Z (SEQ ID NO: 311), X-EDPEY*V-C(Sx)-FK-Z (SEQ ID NO: 312), X-EDPEY*V-C(Sx)-FP-Z (SEQ ID NO: 313), X-EDPEY*V-C(Sx)-IG-Z (SEQ ID NO: 314), X-EDPEY*V-C(Sx)-IK-Z (SEQ ID NO: 315), X-EDPEY*V-C(Sx)-IP-Z (SEQ ID NO: 316), X-EDPEY*V-C(Sx)-MG-Z (SEQ ID NO: 317), X-EDPEY*V-C(Sx)-MK-Z (SEQ ID NO: 318), X-EDPEY*V-C(Sx)-MP-Z (SEQ ID NO: 319), X-EDPEY*V-C(Sx)-VG-Z (SEQ ID NO: 320), X-EDPEY*V-C(Sx)-VK-Z (SEQ ID NO: 321), and X-EDPEY*V-C(Sx)-VP-Z (SEQ ID NO: 322); wherein X is H or acetyl; and Z is OH or NH2.

[0078] In some embodiments, the metal-binding compound of the present invention is selected from the group consisting of: X-EDPIY*F-C(Sx)-FG-Z (SEQ ID NO: 323), X-EDPIY*F-C(Sx)-FK-Z (SEQ ID NO: 324), X-EDPIY*F-C(Sx)-FP-Z (SEQ ID NO: 325), X-EDPIY*F-C(Sx)-IG-Z (SEQ ID NO: 326), X-EDPIY*F-C(Sx)-IK-Z (SEQ ID NO: 327), X-EDPIY*F-C(Sx)-IP-Z (SEQ ID NO: 328), X-EDPIY*F-C(Sx)-MG-Z (SEQ ID NO: 329), X-EDPIY*F-C(Sx)-MK-Z (SEQ ID NO: 330), X-EDPIY*F-C(Sx)-MP-Z (SEQ ID NO: 331), X-EDPIY*F-C(Sx)-VG-Z (SEQ ID NO: 332), X-EDPIY*F-C(Sx)-VK-Z (SEQ ID NO: 333), and X-EDPIY*F-C(Sx)-VP-Z (SEQ ID NO: 334); wherein X is H or acetyl; and Z is OH or NH2.

[0079] In some embodiments, the metal-binding compound of the present invention is selected from the group consisting of: X-EDPIY*I-C(Sx)-FG-Z (SEQ ID NO: 335), X-EDPIY*I-C(Sx)-FK-Z (SEQ ID NO: 336), X-EDPIY*I-C(Sx)-FP-Z (SEQ ID NO: 337), X-EDPIY*I-C(Sx)-IG-Z (SEQ ID NO: 338), X-EDPIY*I-C(Sx)-IK-Z (SEQ ID NO: 339), X-EDPIY*I-C(Sx)-IP-Z (SEQ ID NO: 340), X-EDPIY*I-C(Sx)-MG-Z (SEQ ID NO: 341), X-EDPIY*I-C(Sx)-MK-Z (SEQ ID NO: 342), X-EDPIY*I-C(Sx)-MP-Z (SEQ ID NO: 343), X-EDPIY*I-C(Sx)-VG-Z (SEQ ID NO: 344), X-EDPIY*I-C(Sx)-VK-Z (SEQ ID NO: 345), and X-EDPIY*I-C(Sx)-VP-Z (SEQ ID NO: 346); wherein X is H or acetyl; and Z is OH or NH2.

[0080] In some embodiments, the metal-binding compound of the present invention is selected from the group consisting of: X-EDPIY*V-C(Sx)-FG-Z (SEQ ID NO: 347), X-EDPIY*V-C(Sx)-FK-Z (SEQ ID NO: 348), X-EDPIY*V-C(Sx)-FP-Z (SEQ ID NO: 349), X-EDPIY*V-C(Sx)-IG-Z (SEQ ID NO: 350), X-EDPIY*V-C(Sx)-IK-Z (SEQ ID NO: 351), X-EDPIY*V-C(Sx)-IP-Z (SEQ ID NO: 352), X-EDPIY*V-C(Sx)-MG-Z (SEQ ID NO: 353), X-EDPIY*V-C(Sx)-MK-Z (SEQ ID NO: 354), X-EDPIY*V-C(Sx)-MP-Z (SEQ ID NO: 355), X-EDPIY*V-C(Sx)-VG-Z (SEQ ID NO: 356), X-EDPIY*V-C(Sx)-VK-Z (SEQ ID NO: 357), and X-EDPIY*V-C(Sx)-VP-Z (SEQ ID NO: 358); wherein X is H or acetyl; and Z is OH or NH2.

[0081] In some embodiments, the metal-binding compound of the present invention is selected from the group consisting of: X-EEPDY*F-C(Sx)-FG-Z (SEQ ID NO: 359), X-EEPDY*F-C(Sx)-FK-Z (SEQ ID NO: 360), X-EEPDY*F-C(Sx)-FP-Z (SEQ ID NO: 361), X-EEPDY*F-C(Sx)-IG-Z (SEQ ID NO: 362), X-EEPDY*F-C(Sx)-IK-Z (SEQ ID NO: 363), X-EEPDY*F-C(Sx)-IP-Z (SEQ ID NO: 364), X-EEPDY*F-C(Sx)-MG-Z (SEQ ID NO: 365), X-EEPDY*F-C(Sx)-MK-Z (SEQ ID NO: 366), X-EEPDY*F-C(Sx)-MP-Z (SEQ ID NO: 367), X-EEPDY*F-C(Sx)-VG-Z (SEQ ID NO: 368), X-EEPDY*F-C(Sx)-VK-Z (SEQ ID NO: 369), and X-EEPDY*F-C(Sx)-VP-Z (SEQ ID NO: 370); wherein X is H or acetyl; and Z is OH or NH2.

[0082] In some embodiments, the metal-binding compound of the present invention is selected from the group consisting of: X-EEPDY*I-C(Sx)-FG-Z (SEQ ID NO: 371), X-EEPDY*I-C(Sx)-FK-Z (SEQ ID NO: 372), X-EEPDY*I-C(Sx)-FP-Z (SEQ ID NO: 373), X-EEPDY*I-C(Sx)-IG-Z (SEQ ID NO: 374), X-EEPDY*I-C(Sx)-IK-Z (SEQ ID NO: 375), X-EEPDY*I-C(Sx)-IP-Z (SEQ ID NO: 376), X-EEPDY*I-C(Sx)-MG-Z (SEQ ID NO: 377), X-EEPDY*I-C(Sx)-MK-Z (SEQ ID NO: 378), X-EEPDY*I-C(Sx)-MP-Z (SEQ ID NO: 379), X-EEPDY*I-C(Sx)-VG-Z (SEQ ID NO: 380), X-EEPDY*I-C(Sx)-VK-Z (SEQ ID NO: 381), and X-EEPDY*I-C(Sx)-VP-Z (SEQ ID NO: 382); wherein X is H or acetyl; and Z is OH or NH2.

[0083] In some embodiments, the metal-binding compound of the present invention is selected from the group consisting of: X-EEPDY*V-C(Sx)-FG-Z (SEQ ID NO: 383), X-EEPDY*V-C(Sx)-FK-Z (SEQ ID NO: 384), X-EEPDY*V-C(Sx)-FP-Z (SEQ ID NO: 385), X-EEPDY*V-C(Sx)-IG-Z (SEQ ID NO: 386), X-EEPDY*V-C(Sx)-IK-Z (SEQ ID NO: 387), X-EEPDY*V-C(Sx)-IP-Z (SEQ ID NO: 388), X-EEPDY*V-C(Sx)-MG-Z (SEQ ID NO: 389), X-EEPDY*V-C(Sx)-MK-Z (SEQ ID NO: 390), X-EEPDY*V-C(Sx)-MP-Z (SEQ ID NO: 391), X-EEPDY*V-C(Sx)-VG-Z (SEQ ID NO: 392), X-EEPDY*V-C(Sx)-VK-Z (SEQ ID NO: 393), and X-EEPDY*V-C(Sx)-VP-Z (SEQ ID NO: 394); wherein X is H or acetyl; and Z is OH or NH2.

[0084] In some embodiments, the metal-binding compound of the present invention is selected from the group consisting of: X-EEPEY*F-C(Sx)-FG-Z (SEQ ID NO: 395), X-EEPEY*F-C(Sx)-FK-Z (SEQ ID NO: 396), X-EEPEY*F-C(Sx)-FP-Z (SEQ ID NO: 397), X-EEPEY*F-C(Sx)-IG-Z (SEQ ID NO: 398), X-EEPEY*F-C(Sx)-IK-Z (SEQ ID NO: 399), X-EEPEY*F-C(Sx)-IP-Z (SEQ ID NO: 400), X-EEPEY*F-C(Sx)-MG-Z (SEQ ID NO: 401), X-EEPEY*F-C(Sx)-MK-Z (SEQ ID NO: 402), X-EEPEY*F-C(Sx)-MP-Z (SEQ ID NO: 403), X-EEPEY*F-C(Sx)-VG-Z (SEQ ID NO: 404), X-EEPEY*F-C(Sx)-VK-Z (SEQ ID NO: 405), and X-EEPEY*F-C(Sx)-VP-Z (SEQ ID NO: 406); wherein X is H or acetyl; and Z is OH or NH2.

[0085] In some embodiments, the metal-binding compound of the present invention is selected from the group consisting of: X-EEPEY*I-C(Sx)-FG-Z (SEQ ID NO: 407), X-EEPEY*I-C(Sx)-FK-Z (SEQ ID NO: 408), X-EEPEY*I-C(Sx)-FP-Z (SEQ ID NO: 409), X-EEPEY*I-C(Sx)-IG-Z (SEQ ID NO: 410), X-EEPEY*I-C(Sx)-IK-Z (SEQ ID NO: 411), X-EEPEY*I-C(Sx)-IP-Z (SEQ ID NO: 412), X-EEPEY*I-C(Sx)-MG-Z (SEQ ID NO: 413), X-EEPEY*I-C(Sx)-MK-Z (SEQ ID NO: 414), X-EEPEY*I-C(Sx)-MP-Z (SEQ ID NO: 415), X-EEPEY*I-C(Sx)-VG-Z (SEQ ID NO: 416), X-EEPEY*I-C(Sx)-VK-Z (SEQ ID NO: 417), and X-EEPEY*I-C(Sx)-VP-Z (SEQ ID NO: 418); wherein X is H or acetyl; and Z is OH or NH2.

[0086] In some embodiments, the metal-binding compound of the present invention is selected from the group consisting of: X-EEPEY*V-C(Sx)-FG-Z (SEQ ID NO: 419), X-EEPEY*V-C(Sx)-FK-Z (SEQ ID NO: 420), X-EEPEY*V-C(Sx)-FP-Z (SEQ ID NO: 421), X-EEPEY*V-C(Sx)-IG-Z (SEQ ID NO: 422), X-EEPEY*V-C(Sx)-IK-Z (SEQ ID NO: 423), X-EEPEY*V-C(Sx)-IP-Z (SEQ ID NO: 424), X-EEPEY*V-C(Sx)-MG-Z (SEQ ID NO: 425), X-EEPEY*V-C(Sx)-MK-Z (SEQ ID NO: 426), X-EEPEY*V-C(Sx)-MP-Z (SEQ ID NO: 427), X-EEPEY*V-C(Sx)-VG-Z (SEQ ID NO: 428), X-EEPEY*V-C(Sx)-VK-Z (SEQ ID NO: 429), and X-EEPEY*V-C(Sx)-VP-Z (SEQ ID NO: 430); wherein X is H or acetyl; and Z is OH or NH2.

[0087] In some embodiments, the metal-binding compound of the present invention is selected from the group consisting of: X-EEPIY*A-C(Sx)-[Nle]-K-Z (SEQ ID NO: 431), X-EEPIY*A-C(Sx)-[Nle]-M-Z (SEQ ID NO: 432), X-EEPIY*A-C(Sx)-[Nle]-P-Z (SEQ ID NO: 433), X-EEPIY*A-C(Sx)-FK-Z (SEQ ID NO: 434), X-EEPIY*A-C(Sx)-FM-Z (SEQ ID NO: 435), X-EEPIY*A-C(Sx)-FP-Z (SEQ ID NO: 436), X-EEPIY*A-C(Sx)-IK-Z (SEQ ID NO: 437), X-EEPIY*A-C(Sx)-IM-Z (SEQ ID NO: 438), X-EEPIY*A-C(Sx)-IP-Z (SEQ ID NO: 439), X-EEPIY*A-C(Sx)-LK-Z (SEQ ID NO: 440), X-EEPIY*A-C(Sx)-LM-Z (SEQ ID NO: 441), X-EEPIY*A-C(Sx)-LP-Z (SEQ ID NO: 442), X-EEPIY*A-C(Sx)-MK-Z (SEQ ID NO: 443), X-EEPIY*A-C(Sx)-MM-Z (SEQ ID NO: 444), X-EEPIY*A-C(Sx)-MP-Z (SEQ ID NO: 445), X-EEPIY*A-C(Sx)-VK-Z (SEQ ID NO: 446), X-EEPIY*A-C(Sx)-VM-Z (SEQ ID NO: 447), X-EEPIY*A-C(Sx)-VP-Z (SEQ ID NO: 448), X-EEPIY*A-C(Sx)-WK-Z (SEQ ID NO: 449), X-EEPIY*A-C(Sx)-WM-Z (SEQ ID NO: 450), X-EEPIY*A-C(Sx)-WP-Z (SEQ ID NO: 451), X-EEPIY*A-C(Sx)-XK-Z (SEQ ID NO: 452), X-EEPIY*A-C(Sx)-XM-Z (SEQ ID NO: 453), and X-EEPIY*A-C(Sx)-XP-Z (SEQ ID NO: 454); wherein X is H or acetyl; and Z is OH or NH2.

[0088] In some embodiments, the metal-binding compound of the present invention is selected from the group consisting of: X-EEPIY*F-C(Sx)-[Nle]-K-Z (SEQ ID NO: 455), X-EEPIY*F-C(Sx)-[Nle]-M-Z (SEQ ID NO: 456), X-EEPIY*F-C(Sx)-[Nle]-P-Z (SEQ ID NO: 457), X-EEPIY*F-C(Sx)-FG-Z (SEQ ID NO: 458), X-EEPIY*F-C(Sx)-FK-Z (SEQ ID NO: 459), X-EEPIY*F-C(Sx)-FM-Z (SEQ ID NO: 460), X-EEPIY*F-C(Sx)-FP-Z (SEQ ID NO: 461), X-EEPIY*F-C(Sx)-IG-Z (SEQ ID NO: 462), X-EEPIY*F-C(Sx)-IK-Z (SEQ ID NO: 463), X-EEPIY*F-C(Sx)-IM-Z (SEQ ID NO: 464), X-EEPIY*F-C(Sx)-IP-Z (SEQ ID NO: 465), X-EEPIY*F-C(Sx)-LK-Z (SEQ ID NO: 466), X-EEPIY*F-C(Sx)-LM-Z (SEQ ID NO: 467), X-EEPIY*F-C(Sx)-LP-Z (SEQ ID NO: 468), X-EEPIY*F-C(Sx)-MG-Z (SEQ ID NO: 469), X-EEPIY*F-C(Sx)-MK-Z (SEQ ID NO: 470), X-EEPIY*F-C(Sx)-MM-Z (SEQ ID NO: 471), X-EEPIY*F-C(Sx)-MP-Z (SEQ ID NO: 472), X-EEPIY*F-C(Sx)-VG-Z (SEQ ID NO: 473), X-EEPIY*F-C(Sx)-VK-Z (SEQ ID NO: 474), X-EEPIY*F-C(Sx)-VM-Z (SEQ ID NO: 475), X-EEPIY*F-C(Sx)-VP-Z (SEQ ID NO: 476), X-EEPIY*F-C(Sx)-WK-Z (SEQ ID NO: 477), X-EEPIY*F-C(Sx)-WM-Z (SEQ ID NO: 478), and X-EEPIY*F-C(Sx)-WP-Z (SEQ ID NO: 479); wherein X is H or acetyl; and Z is OH or NH2.

[0089] In some embodiments, the metal-binding compound of the present invention is selected from the group consisting of: X-EEPIY*I-C(Sx)-[Nle]-K-Z (SEQ ID NO: 480), X-EEPIY*I-C(Sx)-[Nle]-M-Z (SEQ ID NO: 481), X-EEPIY*I-C(Sx)-[Nle]-P-Z (SEQ ID NO: 482), X-EEPIY*I-C(Sx)-FG-Z (SEQ ID NO: 483), X-EEPIY*I-C(Sx)-FK-Z (SEQ ID NO: 484), X-EEPIY*I-C(Sx)-FM-Z (SEQ ID NO: 485), X-EEPIY*I-C(Sx)-FP-Z (SEQ ID NO: 486), X-EEPIY*I-C(Sx)-IG-Z (SEQ ID NO: 487), X-EEPIY*I-C(Sx)-IK-Z (SEQ ID NO: 488), X-EEPIY*I-C(Sx)-IM-Z (SEQ ID NO: 489), X-EEPIY*I-C(Sx)-IP-Z (SEQ ID NO: 490), X-EEPIY*I-C(Sx)-LK-Z (SEQ ID NO: 491), X-EEPIY*I-C(Sx)-LM-Z (SEQ ID NO: 492), X-EEPIY*I-C(Sx)-LP-Z (SEQ ID NO: 493), X-EEPIY*I-C(Sx)-MG-Z (SEQ ID NO: 494), X-EEPIY*I-C(Sx)-MK-Z (SEQ ID NO: 495), X-EEPIY*I-C(Sx)-MK-Z (SEQ ID NO: 495), X-EEPIY*I-C(Sx)-MM-Z (SEQ ID NO: 496), X-EEPIY*I-C(Sx)-MP-Z (SEQ ID NO: 497), X-EEPIY*I-C(Sx)-VG-Z (SEQ ID NO: 498), X-EEPIY*I-C(Sx)-VK-Z (SEQ ID NO: 499), X-EEPIY*I-C(Sx)-VM-Z (SEQ ID NO: 500), X-EEPIY*I-C(Sx)-WK-Z (SEQ ID NO: 501), X-EEPIY*I-C(Sx)-WM-Z (SEQ ID NO: 502), X-EEPIY*I-C(Sx)-WP-Z (SEQ ID NO: 503), X-EEPIY*I-C(Sx)-XK-Z (SEQ ID NO: 504), X-EEPIY*I-C(Sx)-XM-Z (SEQ ID NO: 505), and X-EEPIY*I-C(Sx)-XP-Z (SEQ ID NO: 506); wherein X is H or acetyl; and Z is OH or NH2.

[0090] In some embodiments, the metal-binding compound of the present invention is selected from the group consisting of: X-EEPIY*M-C(Sx)-[Nle]-K-Z (SEQ ID NO: 507), X-EEPIY*M-C(Sx)-[Nle]-M-Z (SEQ ID NO: 508), X-EEPIY*M-C(Sx)-[Nle]-P-Z (SEQ ID NO: 509), X-EEPIY*M-C(Sx)-FK-Z (SEQ ID NO: 510), X-EEPIY*M-C(Sx)-FM-Z (SEQ ID NO: 511), X-EEPIY*M-C(Sx)-FP-Z (SEQ ID NO: 512), X-EEPIY*M-C(Sx)-IK-Z (SEQ ID NO: 513), X-EEPIY*M-C(Sx)-IM-Z (SEQ ID NO: 514), X-EEPIY*M-C(Sx)-IP-Z (SEQ ID NO: 515), X-EEPIY*M-C(Sx)-LK-Z (SEQ ID NO: 516), X-EEPIY*M-C(Sx)-LM-Z (SEQ ID NO: 517), X-EEPIY*M-C(Sx)-LP-Z (SEQ ID NO: 518), X-EEPIY*M-C(Sx)-MK-Z (SEQ ID NO: 519), X-EEPIY*M-C(Sx)-MM-Z (SEQ ID NO: 520), X-EEPIY*M-C(Sx)-MP-Z (SEQ ID NO: 521), X-EEPIY*M-C(Sx)-VK-Z (SEQ ID NO: 522), X-EEPIY*M-C(Sx)-VM-Z (SEQ ID NO: 523), X-EEPIY*M-C(Sx)-VP-Z (SEQ ID NO: 524), X-EEPIY*M-C(Sx)-WK-Z (SEQ ID NO: 525), X-EEPIY*M-C(Sx)-WM-Z (SEQ ID NO: 526), and X-EEPIY*M-C(Sx)-WP-Z (SEQ ID NO: 527); wherein X is H or acetyl; and Z is OH or NH2.

[0091] In some embodiments, the metal-binding compound of the present invention is selected from the group consisting of: X-EEPIY*V-C(Sx)-[Nle]-K-Z (SEQ ID NO: 528), X-EEPIY*V-C(Sx)-[Nle]-M-Z (SEQ ID NO: 529), X-EEPIY*V-C(Sx)-[Nle]-P-Z (SEQ ID NO: 530), X-EEPIY*V-C(Sx)-FG-Z (SEQ ID NO: 531), X-EEPIY*V-C(Sx)-FK-Z (SEQ ID NO: 532), X-EEPIY*V-C(Sx)-FM-Z (SEQ ID NO: 533), X-EEPIY*V-C(Sx)-FP-Z (SEQ ID NO: 534), X-EEPIY*V-C(Sx)-IG-Z (SEQ ID NO: 535), X-EEPIY*V-C(Sx)-IK-Z (SEQ ID NO: 536), X-EEPIY*V-C(Sx)-IM-Z (SEQ ID NO: 537), X-EEPIY*V-C(Sx)-IP-Z (SEQ ID NO: 538), X-EEPIY*V-C(Sx)-LK-Z (SEQ ID NO: 539), X-EEPIY*V-C(Sx)-LM-Z (SEQ ID NO: 540), X-EEPIY*V-C(Sx)-LP-Z (SEQ ID NO: 541), X-EEPIY*V-C(Sx)-MG-Z (SEQ ID NO: 542), X-EEPIY*V-C(Sx)-MK-Z (SEQ ID NO: 543), X-EEPIY*V-C(Sx)-MM-Z (SEQ ID NO: 544), X-EEPIY*V-C(Sx)-MP-Z (SEQ ID NO: 545), X-EEPIY*V-C(Sx)-VG-Z (SEQ ID NO: 546), X-EEPIY*V-C(Sx)-VK-Z (SEQ ID NO: 547), X-EEPIY*V-C(Sx)-VM-Z (SEQ ID NO: 548), X-EEPIY*V-C(Sx)-VP-Z (SEQ ID NO: 549), X-EEPIY*V-C(Sx)-WK-Z (SEQ ID NO: 550), X-EEPIY*V-C(Sx)-WM-Z (SEQ ID NO: 551), X-EEPIY*V-C(Sx)-WP-Z (SEQ ID NO: 552), X-EEPIY*V-C(Sx)-XK-Z (SEQ ID NO: 553), X-EEPIY*V-C(Sx)-XM-Z (SEQ ID NO: 554), and X-EEPIY*V-C(Sx)-XP-Z (SEQ ID NO: 555); wherein X is H or acetyl; and Z is OH or NH2.

[0092] In some embodiments, the metal-binding compound of the present invention is selected from the group consisting of: X-EEPIY*W-C(Sx)-[Nle]-K-Z (SEQ ID NO: 556), X-EEPIY*W-C(Sx)-[Nle]-M-Z (SEQ ID NO: 557), X-EEPIY*W-C(Sx)-[Nle]-P-Z (SEQ ID NO: 558), X-EEPIY*W-C(Sx)-FK-Z (SEQ ID NO: 559), X-EEPIY*W-C(Sx)-FM-Z (SEQ ID NO: 560), X-EEPIY*W-C(Sx)-FP-Z (SEQ ID NO: 561), X-EEPIY*W-C(Sx)-IK-Z (SEQ ID NO: 562), X-EEPIY*W-C(Sx)-IM-Z (SEQ ID NO: 563), X-EEPIY*W-C(Sx)-IP-Z (SEQ ID NO: 564), X-EEPIY*W-C(Sx)-LK-Z (SEQ ID NO: 565), X-EEPIY*W-C(Sx)-LM-Z (SEQ ID NO: 566), X-EEPIY*W-C(Sx)-LP-Z (SEQ ID NO: 567), X-EEPIY*W-C(Sx)-MK-Z (SEQ ID NO: 568), X-EEPIY*W-C(Sx)-MM-Z (SEQ ID NO: 569), X-EEPIY*W-C(Sx)-MP-Z (SEQ ID NO: 570), X-EEPIY*W-C(Sx)-VK-Z (SEQ ID NO: 571), X-EEPIY*W-C(Sx)-VM-Z (SEQ ID NO: 572), X-EEPIY*W-C(Sx)-VP-Z (SEQ ID NO: 573), X-EEPIY*W-C(Sx)-WK-Z (SEQ ID NO: 574), X-EEPIY*W-C(Sx)-WM-Z (SEQ ID NO: 575), and X-EEPIY*W-C(Sx)-WP-Z (SEQ ID NO: 576); wherein X is H or acetyl; and Z is OH or NH2.

[0093] In some embodiments, the metal-binding compound of the present invention is selected from the group consisting of: X-RARRRLS*F-C(Sx)-GFGSR-Z (SEQ ID NO: 577), X-LKKLRRRLS*D-C(Sx)-VA-Z (SEQ ID NO: 578), X-SPS-C(Sx)-QS*SMVARTQTVR-Z (SEQ ID NO: 579), X-RKRDRLGT*L-C(Sx)-I-Z (SEQ ID NO: 580), X-KRRRLAS*L-C(Sx)-GHMAR-Z (SEQ ID NO: 581), X-ARARPRTYT*F-C(Sx)-HH-Z (SEQ ID NO: 582), X-KKRNRTLS*V-C(Sx)-VG-Z (SEQ ID NO: 583), X-KKRPQRRYS*N-C(Sx)-FS-Z (SEQ ID NO: 584), X-ARKRERTYT*F-C(Sx)-HH-Z (SEQ ID NO: 585), X-ARKRERAYS*F-C(Sx)-HH-Z (SEQ ID NO: 586), X-KKKRFS*F-C(Sx)-KSFKLSGFSFKK-Z (SEQ ID NO: 587), X-KKKRFSF-C(Sx)-KS*FKLSGFSFKK-Z (SEQ ID NO: 588), X-MFAVRDRRQT*V-C(Sx)-KGVIKAVD-Z (SEQ ID NO: 589), X-KGTLVQTKGTGASGS*F-C(Sx)-LNK-Z (SEQ ID NO: 590), X-KKKRFSFKKS*F-C(Sx)-LSGFSFKK-Z (SEQ ID NO: 591), X-KKKRFSFKKSF-C(Sx)-LS*GFSFKK-Z (SEQ ID NO: 592), X-RFAVRDMRQT*V-C(Sx)-VGVIKAVD-Z (SEQ ID NO: 593), X-KKK-C(Sx)-FS*FKKSFKLSGFSFKK-Z (SEQ ID NO: 594), X-KKRFSFKKSFKLSGFS*F-C(Sx)-KN-Z (SEQ ID NO: 595), X-TASQDVANRFARKGS*L-C(Sx)-QKN-Z (SEQ ID NO: 596), X-RFARKGS*L-C(Sx)-QKN-Z (SEQ ID NO: 597); wherein X is H or acetyl; and Z is OH or NH2.

[0094] In some embodiments, the metal-binding compound of the present invention is selected from the group consisting of: X-KEVPR-C(Sx)-KS*LVGTPYWMAPE-Z (SEQ ID NO: 598), X-KEVPR-C(Sx)-KS*LVGTPYWMAPE-Z (SEQ ID NO: 598); wherein X is H or acetyl; and Z is OH or NH2.

[0095] In some embodiments, the metal-binding compound of the present invention is selected from the group consisting of: X-KKALRRQET*V-C(Sx)-AL-Z (SEQ ID NO: 234), X-KLNRVFS*V-C(Sx)-VA-Z (SEQ ID NO: 599), X-TRPRKRQGS*F-C(Sx)-RR-Z (SEQ ID NO: 600), X-KKRFSFKKT*F-C(Sx)-LSGFSFKK-Z (SEQ ID NO: 601), X-ARKRERAYS*F-C(Sx)-VG-Z (SEQ ID NO: 602), X-ARKKWKQS*V-C(Sx)-LIS-Z (SEQ ID NO: 603), X-DNKLRRYT*T-C(Sx)-SKRKT-Z (SEQ ID NO: 604), X-EPPLSQET*F-C(Sx)-DLWKL-Z (SEQ ID NO: 605), X-IIMDSSIS*K-C(Sx)-ALSEI-Z (SEQ ID NO: 606), X-KTIERRYS*D-C(Sx)-TTLVA-Z (SEQ ID NO: 607), X-LSRRL-C(Sx)-VT*GDLFDIM-Z (SEQ ID NO: 608), X-NKLRRQHS*Y-C(Sx)-TFVDL-Z (SEQ ID NO: 609), X-RREER-C(Sx)-LS*APGNLLT-Z (SEQ ID NO: 610), X-KRPQRATS*N-C(Sx)-FAMFD-Z (SEQ ID NO: 611), X-VRRRWKLS*F-C(Sx)-IVSL-Z (SEQ ID NO: 612), MSSKRTKT*K-C(Sx)-KKRPQ-Z (SEQ ID NO: 613), X-ARQSRRST*Q-C(Sx)-VTLTD-Z (SEQ ID NO: 614), X-DKKGNFNY*I-C(Sx)-FTRIL-Z (SEQ ID NO: 615), X-EFKNIFGT*P-C(Sx)-FVAPE-Z (SEQ ID NO: 616), X-EYTIKSHS*S-C(Sx)-PPNNS-Z (SEQ ID NO: 617), X-KDPKRRMT*I-C(Sx)-QSLEH-Z (SEQ ID NO: 618), X-KKRPQRAT*S-C(Sx)-VFAMF-Z (SEQ ID NO: 619), X-KQTAR-C(Sx)-ST*GGKAPRK-Z (SEQ ID NO: 620), X-LGETKQET*L-C(Sx)-NISAV-Z (SEQ ID NO: 621), X-PERRRLKT*T-C(Sx)-LKEYT-Z (SEQ ID NO: 622), X-PYHFRAPS*R-C(Sx)-FWRTV-Z (SEQ ID NO: 623), X-QGRKRRQT*S-C(Sx)-TDFYH-Z (SEQ ID NO: 624), X-RPREKRRS*T-C(Sx)-VSFWT-Z (SEQ ID NO: 625), X-RQRKRHKS*D-C(Sx)-ISLSF-Z (SEQ ID NO: 626), X-SSRRR-C(Sx)-IS*ETEENSD-Z (SEQ ID NO: 627), X-TIGRSRST*R-C(Sx)-REQEN-Z (SEQ ID NO: 628), X-TEMGDRFT*D-C(Sx)-EVDEL-Z (SEQ ID NO: 629), X-TTRLK-C(Sx)-YT*IKSHSSL-Z (SEQ ID NO: 630), X-PLSQETFS*D-C(Sx)-WKLLP-Z (SEQ ID NO: 631), X-ENIPEDSS*M-C(Sx)-SKRFR-Z (SEQ ID NO: 632), X-PEDSSMVS*K-C(Sx)-FRFDD-Z (SEQ ID NO: 633), X-RFDCR-C(Sx)-IS*GLLTITP-Z (SEQ ID NO: 634), X-RRRFD-C(Sx)-RS*ISGLLTT-Z (SEQ ID NO: 635), X-SEDKTSKS*S-C(Sx)-NGT-Z (SEQ ID NO: 636), X-SKSS-C(Sx)-NGT*CGDREDK-Z (SEQ ID NO: 637), X-KKRAARASTS*N-C(Sx)-RR-Z (SEQ ID NO: 638), X-ILSR-C(Sx)-PS*YRKILN-Z (SEQ ID NO: 639), X-PLRRTLS*V-C(Sx)-ASPS-Z (SEQ ID NO: 640); wherein X is H or acetyl; and Z is OH or NH2.

[0096] In some embodiments, the metal-binding compound of the present invention is selected from the group consisting of: X-HAAIGDDDDAYS*I-C(Sx)-A-Z (SEQ ID NO: 641); wherein X is H or acetyl; and Z is OH or NH2.

[0097] In some embodiments, the metal-binding compound of the present invention is selected from the group consisting of: X-KK-C(Sx)-RLS*PGRRRK-Z (SEQ ID NO: 642), X-QGKFLQT*F-C(Sx)-GSPLYRRR-Z (SEQ ID NO: 643), X-GRDK-C(Sx)-KS*LRQIRQ-Z (SEQ ID NO: 644), X-LSR-C(Sx)-SS*PHQ[pS]EDEEE-Z (SEQ ID NO: 645), X-SR-C(Sx)-SS*PHQ[pS]EDEEEPRD-Z (SEQ ID NO: 646), X-GT*F-C(Sx)-AAIRRLAARRR-Z (SEQ ID NO: 647), X-KTGPLS*P-C(Sx)-PFK-Z (SEQ ID NO: 648), X-GLYRS*P-C(Sx)-MPENLNRPRL-Z (SEQ ID NO: 649), X-KRELVE-C(Sx)-LT*PSGEAPNQALLR-Z (SEQ ID NO: 650); wherein X is H or acetyl; and Z is OH or NH2.

[0098] In some embodiments, the metal-binding compound of the present invention is selected from the group consisting of: X-GDQDYLS*L-C(Sx)-VG-Z (SEQ ID NO: 651), X-ILSRRPS*Y-C(Sx)-KILN-Z (SEQ ID NO: 652), X-QLIDSMANS*F-C(Sx)-GTRRR-Z (SEQ ID NO: 653), X-KKERLLDDRHDS*G-C(Sx)-DSMDEE-Z (SEQ ID NO: 654), X-KKERLLDDRHDSGLDS*M-C(Sx)-EE-Z (SEQ ID NO: 655); wherein X is H or acetyl; and Z is OH or NH2.

[0099] In some embodiments, the metal-binding compound of the present invention is selected from the group consisting of: X-QDLDE-C(Sx)-VS*QEDVPLV-Z (SEQ ID NO: 656), X-ISAQIGAT*L-C(Sx)-RRLSF-Z (SEQ ID NO: 657), X-WHKTTQMS*A-C(Sx)-GTYA-Z (SEQ ID NO: 658), X-SGRPRTTS*F-C(Sx)-ESCKP-Z (SEQ ID NO: 659), X-RSGL-C(Sx)-RS*PSMPENLNRPRLK-Z (SEQ ID NO: 660), X-KDQEAKVSRSGLYRS*P-C(Sx)-MPEN-Z (SEQ ID NO: 661), X-DE-C(Sx)-EGT*FRSSIRRLSSRRR-Z (SEQ ID NO: 662), X-DEE-C(Sx)-GT*FRSSIRRLSSRRR-Z (SEQ ID NO: 663), X-DEEEGT*F-C(Sx)-SSIRRLSSRRR-Z (SEQ ID NO: 664), X-DE-C(Sx)-EGT*FRAAIRRLAARRR-Z (SEQ ID NO: 665), X-DEE-C(Sx)-GT*FRAAIRRLAARRR-Z (SEQ ID NO: 666), X-DEEEGT*F-C(Sx)-AAIRRLAARRR-Z (SEQ ID NO: 667), X-QGKF-C(Sx)-QT*FCGSPLYRRR-Z (SEQ ID NO: 668), X-HVNATY*V-C(Sx)-VKCVAP-Z (SEQ ID NO: 669), X-CKRRRLAS*L-C(Sx)-Z (SEQ ID NO: 670), X-NTFIG-C(Sx)-PY*WMAPEVI-Z (SEQ ID NO: 671), X-RRNTFIGT*P-C(Sx)-WMAPE-Z (SEQ ID NO: 672), X-RTVGRRNT*F-C(Sx)-GTPYW-Z (SEQ ID NO: 673); wherein X is H or acetyl; and Z is OH or NH2.

[0100] In some embodiments, the metal-binding compound of the present invention is selected from the group consisting of: X-GRDK-C(Sx)-KT*LRQIRQ-Z (SEQ ID NO: 674), X-QLIDS*M-C(Sx)-NSFVGTRRR-Z (SEQ ID NO: 675), X-QLIDSM-C(Sx)-NS*FVGTRRR-Z (SEQ ID NO: 676), X-RAL-C(Sx)-DS*FRRRDTAQ-Z (SEQ ID NO: 677), X-KLRALTDS*F-C(Sx)-RR-Z (SEQ ID NO: 678); wherein X is H or acetyl; and Z is OH or NH2.

[0101] In some embodiments, the metal-binding compound of the present invention is selected from the group consisting of: X-SFLSRSKS*F-C(Sx)-PLLHY-Z (SEQ ID NO: 679), X-SFLSR-C(Sx)-KS*FSPLLHY-Z (SEQ ID NO: 680), X-SFLSRSKS*F-C(Sx)-PLLHL-Z (SEQ ID NO: 681), X-SFLSR-C(Sx)-KS*FRPLLHL-Z (SEQ ID NO: 682), X-SGLSRSKS*F-C(Sx)-RLSHQ-Z (SEQ ID NO: 683), X-SGLSR-C(Sx)-KS*FRRLSHQ-Z (SEQ ID NO: 684), X-QHLRLSTS*S-C(Sx)-RLLYA-Z (SEQ ID NO: 685), X-QHLRL-C(Sx)-TS*SGRLLYA-Z (SEQ ID NO: 686), X-PLSTWSGS*P-C(Sx)-YAAPE-Z (SEQ ID NO: 687), X-PLST-C(Sx)-SGS*PPYAAPE-Z (SEQ ID NO: 688), X-PLSTW-C(Sx)-GS*PPYAAPE-Z (SEQ ID NO: 689), X-PESFSSGS*Q-C(Sx)-VHQKR-Z (SEQ ID NO: 690), X-PESF-C(Sx)-SGS*QDVHQKR-Z (SEQ ID NO: 691), X-LLATWSGS*P-C(Sx)-YAAPE-Z (SEQ ID NO: 692), X-SALNRTSS*D-C(Sx)-ALHTS-Z (SEQ ID NO: 693), X-SALNR-C(Sx)-SS*DSALHTS-Z (SEQ ID NO: 694), X-AMARAAS*A-C(Sx)-ALARRR-Z (SEQ ID NO: 215), X-AMAR-C(Sx)-AS*AAALARRR-Z (SEQ ID NO: 695), X-ALNRTSS*D-C(Sx)-ALHRRR-Z (SEQ ID NO: 696), X-ALNR-C(Sx)-SS*DSALHRRR-Z (SEQ ID NO: 697); wherein X is H or acetyl; and Z is OH or NH2.

[0102] In some embodiments, the metal-binding compound of the present invention is selected from the group consisting of: X-PKRSRSSS*F-C(Sx)-PGTRK-Z (SEQ ID NO: 698), X-PKRSR-C(Sx)-SS*FPPGTRK-Z (SEQ ID NO: 699), X-APNVH-C(Sx)-NT*IEPVNID-Z (SEQ ID NO: 700), X-PKALQRLS*R-C(Sx)-IVRSR-Z (SEQ ID NO: 701), X-ALQRLSRS*I-C(Sx)-RSRAH-Z (SEQ ID NO: 702), X-LSRSIVRS*R-C(Sx)-HSTAV-Z (SEQ ID NO: 703), X-IVRSRAHS*T-C(Sx)-VGIFS-Z (SEQ ID NO: 704), X-EIRSR-C(Sx)-SS*YPAGTED-Z (SEQ ID NO: 705), X-ARQSRRST*Q-C(Sx)-VTLTD-Z (SEQ ID NO: 614), X-SQRQRSTS*T-C(Sx)-NVH[Nle]V-Z (SEQ ID NO: 706), X-PKINRSAS*E-C(Sx)-SLHRA-Z (SEQ ID NO: 707), X-PKINR-C(Sx)-AS*EPSLHRA-Z (SEQ ID NO: 708), X-RKSGKRQT*E-C(Sx)-EKKKK-Z (SEQ ID NO: 709), X-RPRGQRDS*S-C(Sx)-YWEIE-Z (SEQ ID NO: 710), X-RPRGQ-C(Sx)-DS*SYYWEIE-Z (SEQ ID NO: 711), X-VSGQLIDS*[Nle]-C(Sx)-NSFVG-Z (SEQ ID NO: 712), X-VSGQL-C(Sx)-DS*[Nle]ANSFVG-Z (SEQ ID NO: 713), X-LIDS[Nle]ANS*F-C(Sx)-GTRSY-Z (SEQ ID NO: 714), X-LIDS[Nle]-C(Sx)-NS*FVGTRSY-Z (SEQ ID NO: 715), X-SPRSDRDS*F-C(Sx)-PLSSL-Z (SEQ ID NO: 716), X-SPRSD-C(Sx)-DS*FRPLSSL-Z (SEQ ID NO: 717), X-NVH[Nle]VSTT*L-C(Sx)-VDSR-Z (SEQ ID NO: 718), X-NVH[Nle]V-C(Sx)-TT*LPVDSR-Z (SEQ ID NO: 719), X-RRRSDDDS*P-C(Sx)-PSTHK-Z (SEQ ID NO: 720), X-RRRSD-C(Sx)-DS*PRPSTHK-Z (SEQ ID NO: 721), X-QNRSGAMS*P-C(Sx)-SWNSD-Z (SEQ ID NO: 722), X-AKELDQGS*L-C(Sx)-TSFVG-Z (SEQ ID NO: 723), X-AGTSF[Nle][Nle]T*P-C(Sx)-VVTRY-Z (SEQ ID NO: 724), X-AGTSF-C(Sx)-[Nle]T*PYVVTRY-Z (SEQ ID NO: 725), X-AGTSF-C(Sx)-[Nle]T*P[pY]VVTRY-Z (SEQ ID NO: 726), X-TSF[Nle][Nle]TPY*V-C(Sx)-TRYYR-Z (SEQ ID NO: 727), X-TSF[Nle][Nle][pT]PY*V-C(Sx)-TRYYR-Z (SEQ ID NO: 728), X-ETPPRPRT*P-C(Sx)-RPLSS-Z (SEQ ID NO: 729), X-ARLASKGT*GA-C(Sx)-EFQG-Z (SEQ ID NO: 730), X-FQGQLLGT*I-C(Sx)-F[Nle]APE-Z (SEQ ID NO: 731), X-NTIDLP[Nle]S*P-C(Sx)-TLDSL-Z (SEQ ID NO: 732), X-DPGSA-C(Sx)-PY*LKTKFI-Z (SEQ ID NO: 733), X-ISGQLVDS*I-C(Sx)-KTRDA-Z (SEQ ID NO: 734), X-ISGQL-C(Sx)-DS*IAKTRDA-Z (SEQ ID NO: 735), X-ISGRLVDS*K-C(Sx)-KTRSA-Z (SEQ ID NO: 736), X-ISGRL-C(Sx)-DS*KAKTRSA-Z (SEQ ID NO: 737), X-ISGYLVDS*V-C(Sx)-KTIDA-Z (SEQ ID NO: 738), X-ISGYL-C(Sx)-DS*VAKTIDA-Z (SEQ ID NO: 739), X-LVDSIAKT*R-C(Sx)-AGSRP-Z (SEQ ID NO: 740), X-LVDSI-C(Sx)-KT*RDAGSRP-Z (SEQ ID NO: 741), X-LVDSKAKT*R-C(Sx)-AGSAA-Z (SEQ ID NO: 742), X-LVDSK-C(Sx)-KT*RSAGSAA-Z (SEQ ID NO: 743), X-LVDSVAKT*I-C(Sx)-AGSKP-Z (SEQ ID NO: 744), X-LVDSV-C(Sx)-KT*IDAGSKP-Z (SEQ ID NO: 745), X-SQKLLDAS*K-C(Sx)-AKNFV-Z (SEQ ID NO: 746), X-YEHQRVYT*Y-C(Sx)-QSRFY-Z (SEQ ID NO: 747), X-WHKITKMS*A-C(Sx)-GTYAW-Z (SEQ ID NO: 748), X-LAREW-C(Sx)-KT*TK[Nle]SAAG-Z (SEQ ID NO: 749), X-TKQTARKS*T-C(Sx)-GKAPR-Z (SEQ ID NO: 750), X-KQTAR-C(Sx)-ST*GGKAPRK-Z (SEQ ID NO: 620), X-KRPQRATS*N-C(Sx)-FA[Nle]FD-Z (SEQ ID NO: 751), X-KKRPQRAT*S-C(Sx)-VFA[Nle]F-Z (SEQ ID NO: 752), X-TVGNKLDT*F-C(Sx)-GSPPY-Z (SEQ ID NO: 753), X-TFGNKLDT*F-C(Sx)-GSPPY-Z (SEQ ID NO: 754), X-VSTQLVNS*I-C(Sx)-KTYVG-Z (SEQ ID NO: 755), X-LVNSIAKT*Y-C(Sx)-GTNAY-Z (SEQ ID NO: 756), X-S[Nle]DGLFGT*I-C(Sx)-YLPPE-Z (SEQ ID NO: 757), X-PDKQFLIS*P-C(Sx)-ASPPV-Z (SEQ ID NO: 758), X-FLISPPAS*P-C(Sx)-VGWKQ-Z (SEQ ID NO: 759), X-LVDSVAKT*[Nle]-C(Sx)-AGSKP-Z (SEQ ID NO: 760), X-KLKNN-C(Sx)-QT*[Nle]PGEVNS-Z (SEQ ID NO: 761), X-DENFE-C(Sx)-HS*APPSPEE-Z (SEQ ID NO: 762), X-NEYLR-C(Sx)-IS*LPVPVLV-Z (SEQ ID NO: 763), X-GDNVLINT*Y-C(Sx)-GVLKI-Z (SEQ ID NO: 764), X-GINPSTET*F-C(Sx)-GTLQY-Z (SEQ ID NO: 765), X-TETFTGT*L-C(Sx)-Y[Nle]APE-Z (SEQ ID NO: 766), X-IPERDSRY*S-C(Sx)-PLHEE-Z (SEQ ID NO: 767), X-DNVLINTY*S-C(Sx)-VLKIS-Z (SEQ ID NO: 768), X-GGRRPGTS*P-C(Sx)-LLQGT-Z (SEQ ID NO: 769), X-LVQGI-C(Sx)-FS*QPTSPDH-Z (SEQ ID NO: 770), X-EDQPR-C(Sx)-QS*LDSALLE-Z (SEQ ID NO: 771), X-FPKDLRGT*E-C(Sx)-Y[Nle]SPE-Z (SEQ ID NO: 772), X-LELSRRRS*L-C(Sx)-ELHKR-Z (SEQ ID NO: 773), X-YDGERKKT*L-C(Sx)-GTPNY-Z (SEQ ID NO: 774), X-RTPGRPLS*S-C(Sx)-G[Nle]DSR-Z (SEQ ID NO: 775), X-PGRPL-C(Sx)-SY*G[Nle]DSRPP-Z (SEQ ID NO: 776), X-DGR[Nle]VQLS*P-C(Sx)-ALAAP-Z (SEQ ID NO: 777), X-SYTPTPRS*P-C(Sx)-FIGRR-Z (SEQ ID NO: 778), X-HDHTGFLT*E-C(Sx)-VATRW-Z (SEQ ID NO: 779), X-HDHTG-C(Sx)-LT*EYVATRW-Z (SEQ ID NO: 780), X-HDHTG-C(Sx)-LT*E[pY]VATRW-Z (SEQ ID NO: 781), X-HTGFLTEY*V-C(Sx)-TRWYR-Z (SEQ ID NO: 782), X-HTGFL[pT]EY*V-C(Sx)-TRWYR-Z (SEQ ID NO: 783), X-RGEPNVSY*I-C(Sx)-SRYYR-Z (SEQ ID NO: 784), X-TVNQSLLS*P-C(Sx)-VLEVD-Z (SEQ ID NO: 785), X-SPLNITST*P-C(Sx)-PDASS-Z (SEQ ID NO: 786); wherein X is H or acetyl; and Z is OH or NH2.

[0103] In some embodiments, the metal-binding compound of the present invention is selected from the group consisting of: X-AAFRLFKY*GV-C(Sx)-LYKN-Z (SEQ ID NO: 787), X-AAFRL-C(Sx)-KY*GVQLYKN-Z (SEQ ID NO: 788), X-SIESDIY*A-C(Sx)-IPDET-Z (SEQ ID NO: 789), X-DSQQTNDY*[Nle]-C(Sx)-PEEDW-Z (SEQ ID NO: 790), X-DVYEEDSY*V-C(Sx)-RSQGR-Z (SEQ ID NO: 791), X-EELA[Nle]DVY*D-C(Sx)-VDRRE-Z (SEQ ID NO: 792), X-EGGW[Nle]EDY*D-C(Sx)-VHLQG-Z (SEQ ID NO: 793), X-EIYDRREY*S-C(Sx)-FEKEQ-Z (SEQ ID NO: 794), X-ELFDDPSY*V-C(Sx)-VQNLD-Z (SEQ ID NO: 795), X-ERSW[Nle]DDY*D-C(Sx)-VHLQG-Z (SEQ ID NO: 796), X-FGIED-C(Sx)-DY*VEPSGFT-Z (SEQ ID NO: 797), X-FGLGSRAY*P-C(Sx)-FAA-Z (SEQ ID NO: 798), X-FLSEETPY*S-C(Sx)-PTGNH-Z (SEQ ID NO: 799), X-FLSEE-C(Sx)-PY*SYPTGNH-Z (SEQ ID NO: 800), X-FRKNFAKY*E-C(Sx)-FKSSP-Z (SEQ ID NO: 801), X-GW[Nle]EDYDY*V-C(Sx)-LQGKE-Z (SEQ ID NO: 802), X-IIDEEDTY*T-C(Sx)-PSTRD-Z (SEQ ID NO: 803), X-IIDEE-C(Sx)-TY*T[Nle]PSTRD-Z (SEQ ID NO: 804), X-KDNDSHVY*A-C(Sx)-IEDT-Z (SEQ ID NO: 805), X-LDGEVTPY*A-C(Sx)-TNNNA-Z (SEQ ID NO: 806), X-LPQDKEYY*K-C(Sx)-KEPGE-Z (SEQ ID NO: 807), X-NSTPESDY*D-C(Sx)-TPND[Nle]-Z (SEQ ID NO: 808), X-PAPLTPAY*H-C(Sx)-LPHPS-Z (SEQ ID NO: 809), X-PSPATDLY*Q-C(Sx)-PPGPG-Z (SEQ ID NO: 810), X-QDNDQPDY*D-C(Sx)-VASDE-Z (SEQ ID NO: 811), X-QPSSKAL*YD-C(Sx)-EPEND-Z (SEQ ID NO: 812), X-RDKQRLSY*GA-C(Sx)-TNQI-Z (SEQ ID NO: 813), X-RDKQR-C(Sx)-SY*GAFTNQI-Z (SEQ ID NO: 814), X-RETSKVIY*D-C(Sx)-IEKTG-Z (SEQ ID NO: 815), X-RLIEDNEY*T-C(Sx)-RQGAK-Z (SEQ ID NO: 816), X-RLIED-C(Sx)-EY*TARQGAK-Z (SEQ ID NO: 817), X-RY[Nle]ED-C(Sx)-TY*YKASKGK-Z (SEQ ID NO: 818), X-SGDKDHLY*S-C(Sx)-VAKPR-Z (SEQ ID NO: 819), X-SIREDDDY*D-C(Sx)-IIDHG-Z (SEQ ID NO: 820), X-SVSETDDY*A-C(Sx)-IIDEE-Z (SEQ ID NO: 821), X-VDPDNEAY*E-C(Sx)-PSEEG-Z (SEQ ID NO: 822), X-VGEEEHVY*S-C(Sx)-PNKQK-Z (SEQ ID NO: 823), X-VGEEE-C(Sx)-VY*SFPNKQK-Z (SEQ ID NO: 824), X-VLPQD-C(Sx)-EY*YKVKEPG-Z (SEQ ID NO: 825), X-YMEDSTYY*K-C(Sx)-SKGKL-Z (SEQ ID NO: 826), X-YRLSVEIY*D-C(Sx)-REYSR-Z (SEQ ID NO: 827), [Nle]EAIAKY*D-C(Sx)-KATAD-Z (SEQ ID NO: 828), X-AEPLPPSY*V-C(Sx)-AS-Z (SEQ ID NO: 829), X-AEPLP-C(Sx)-SY*VASS-Z (SEQ ID NO: 830), X-AIETDKEY*Y-C(Sx)-VKDDR-Z (SEQ ID NO: 831), X-AIYNSISY*K-C(Sx)-FLPK-Z (SEQ ID NO: 832), X-AVPEG-C(Sx)-EY*YRVREDG-Z (SEQ ID NO: 833), X-DGFIPKNY*I-C(Sx)-[Nle]KPHP-Z (SEQ ID NO: 834), X-DGPKGTGY*I-C(Sx)-TELIS-Z (SEQ ID NO: 835), X-DGPK-C(Sx)-TGY*IKTELIS-Z (SEQ ID NO: 836), X-DPGSA-C(Sx)-PY*LKTKFI-Z (SEQ ID NO: 733), X-DQTPL-C(Sx)-IY*NSISYKT-Z (SEQ ID NO: 837), X-DRLSQGAY*GG-C(Sx)-SDRP-Z (SEQ ID NO: 838), X-DRLSQ-C(Sx)-AY*GGLSDRP-Z (SEQ ID NO: 839), X-EESDQNWY*K-C(Sx)-ELNGK-Z (SEQ ID NO: 840), X-EESEDPDY*Y-C(Sx)-YNIQG-Z (SEQ ID NO: 841), X-ESQEELHY*A-C(Sx)-LNFPG-Z (SEQ ID NO: 842), X-EYLGTKRY*I-C(Sx)-RDLAT-Z (SEQ ID NO: 843), X-GSNQEEAY*V-C(Sx)-MSSFY-Z (SEQ ID NO: 844), X-GSVE[Nle]-C(Sx)-RY*DPLQDNT-Z (SEQ ID NO: 845), X-GVKKP-C(Sx)-RY*RPGTVAL-Z (SEQ ID NO: 846), X-HRIDGKIY*V-C(Sx)-KRVKY-Z (SEQ ID NO: 847), X-HTGFLTEY*V-C(Sx)-TRWYR-Z (SEQ ID NO: 782), X-HWKKYDIY*E-C(Sx)-QTKEE-Z (SEQ ID NO: 848), X-IDENSLLS*P-C(Sx)-AGEDD-Z (SEQ ID NO: 849), X-IETDKEYY*T-C(Sx)-KDDRD-Z (SEQ ID NO: 850), X-ILAIH-C(Sx)-SY*KPEFHSD-Z (SEQ ID NO: 851), X-ILLTIDRY*L-C(Sx)-IVHAV-Z (SEQ ID NO: 852), X-IPERDSRY*S-C(Sx)-PLHEE-Z (SEQ ID NO: 767), X-IRAKIQDY*H-C(Sx)-LTRKR-Z (SEQ ID NO: 853), X-IREFLDQY*D-C(Sx)-PL-Z (SEQ ID NO: 854), X-IREFL-C(Sx)-QY*DAPL-Z (SEQ ID NO: 855), X-KDISY-C(Sx)-RY*IPETLNK-Z (SEQ ID NO: 856), X-KFGSLDTY*L-C(Sx)-KNKN-Z (SEQ ID NO: 857), X-LAKAVDGY*V-C(Sx)-PQIKQ-Z (SEQ ID NO: 858), X-LAKA-C(Sx)-DGY*VKPQIKQ-Z (SEQ ID NO: 859), X-LILEDDDY*V-C(Sx)-VFFHQ-Z (SEQ ID NO: 860), X-LI[Nle]EY-C(Sx)-PY*GSLRDYL-Z (SEQ ID NO: 861), X-LLPLDKDY*Y-C(Sx)-VREPG-Z (SEQ ID NO: 862), X-LPLDKDYY*V-C(Sx)-REPGQ-Z (SEQ ID NO: 863), X-LPQDKEYY*K-C(Sx)-KEPGE-Z (SEQ ID NO: 807), X-[Nle]APPSEET*P-C(Sx)-IPQRS-Z (SEQ ID NO: 864), X-NHIGHTGY*L-C(Sx)-TVTVS-Z (SEQ ID NO: 865), X-NHIG-C(Sx)-TGY*LNTVTVS-Z (SEQ ID NO: 866), X-NLKLI-C(Sx)-EY*LPYGSLR-Z (SEQ ID NO: 867), X-NLQERRKY*L-C(Sx)-HRLI-Z (SEQ ID NO: 868), X-NLQER-C(Sx)-KY*LKHRLI-Z (SEQ ID NO: 869), X-NSKPKKSY*I-C(Sx)-TQG-Z (SEQ ID NO: 870), X-NSLFTPDY*E-C(Sx)-LTEND-Z (SEQ ID NO: 871), X-NSLISSDY*E-C(Sx)-LSDPT-Z (SEQ ID NO: 872), X-PEHTKSVY*T-C(Sx)-SVIEP-Z (SEQ ID NO: 873), X-PKGTQADY*A-C(Sx)-VKFQ-Z (SEQ ID NO: 874), X-PKGTQ-C(Sx)-DY*AEVKFQ-Z (SEQ ID NO: 875), X-PNEPVSDY*I-C(Sx)-ANI-Z (SEQ ID NO: 876), X-PPHLKYLY*L-C(Sx)-VSDSG-Z (SEQ ID NO: 877), X-PSSSIDEY*F-C(Sx)-EQPLK-Z (SEQ ID NO: 878), X-PTPPHLKY*L-C(Sx)-LVVSD-Z (SEQ ID NO: 879), X-PYGSLRDY*L-C(Sx)-KHKER-Z (SEQ ID NO: 880), X-QHDNIVKY*K-C(Sx)-VAYSA-Z (SEQ ID NO: 881), X-QISKG[Nle]EY*L-C(Sx)-SRRSV-Z (SEQ ID NO: 882), X-QISKG-C(Sx)-EY*LGTKRYI-Z (SEQ ID NO: 883), X-RHSTILDY*I-C(Sx)-VVPTA-Z (SEQ ID NO: 884), X-SFLSRSLY*F-C(Sx)-PLLHY-Z (SEQ ID NO: 885), X-SGGER-C(Sx)-DY*VAPSGSY-Z (SEQ ID NO: 886), X-SLRLV-C(Sx)-EY*LPSGSLR-Z (SEQ ID NO: 887), X-SPLTIGVY*V-C(Sx)-[Nle]PPTE-Z (SEQ ID NO: 888), X-TAKAVDGY*V-C(Sx)-PQIKQ-Z (SEQ ID NO: 889), X-TEQDL-C(Sx)-LY*SDFPNII-Z (SEQ ID NO: 890), X-TGMFPRNY*V-C(Sx)-PVNRN-Z (SEQ ID NO: 891), X-TPENN-C(Sx)-EY*AKVSGV[Nle]-Z (SEQ ID NO: 892), X-TSDEKVDY*V-C(Sx)-VDKEK-Z (SEQ ID NO: 893), X-VAKFIDDY*V-C(Sx)-VQIKQ-Z (SEQ ID NO: 894), X-VFLRSINY*V-C(Sx)-FPSLK-Z (SEQ ID NO: 895), X-VHPLSAPY*P-C(Sx)-LDTPE-Z (SEQ ID NO: 896), X-VHPLS-C(Sx)-PY*PPLDTPE-Z (SEQ ID NO: 897), X-VKYKGVAY*S-C(Sx)-GRRNL-Z (SEQ ID NO: 898), X-VLNQEEAY*V-C(Sx)-[Nle]ASFY-Z (SEQ ID NO: 899), X-VLPQD-C(Sx)-EY*YKVKEPG-Z (SEQ ID NO: 825), X-VLYRIRFY*F-C(Sx)-RWYSS-Z (SEQ ID NO: 900), X-VNGHLDSY*E-C(Sx)-VTQLP-Z (SEQ ID NO: 901), X-VPEGHEYY*R-C(Sx)-REDGD-Z (SEQ ID NO: 902), X-VRREVGDY*GQ-C(Sx)-HETE-Z (SEQ ID NO: 903), X-G[Nle]E-C(Sx)-IY*FEF[Nle]GGKKK-Z (SEQ ID NO: 904), X-G[Nle]EDIY*F-C(Sx)-F[Nle]GGKKK-Z (SEQ ID NO: 905), X-EAIY*A-C(Sx)-PFAKKK-Z (SEQ ID NO: 906), X-E-C(Sx)-IY*AAPFAKKK-Z (SEQ ID NO: 907); wherein X is H or acetyl; and Z is OH or NH2.

[0104] In some embodiments, the metal-binding compound of the present invention is selected from the group consisting of: X-RRAEEEEY*I-C(Sx)-LVA-Z (SEQ ID NO: 908), X-RAEEEEY*I-C(Sx)-LVA-Z (SEQ ID NO: 909), X-KKKAEEEEY*I-C(Sx)-L-Z (SEQ ID NO: 910), X-KKKAEEEEY*I-C(Sx)-Z (SEQ ID NO: 911), X-VYS-C(Sx)-DY*YRLFNPSKKK-Z (SEQ ID NO: 912), X-VYS-C(Sx)-DY*[pY]RLFNPSKKK-Z (SEQ ID NO: 913), X-GAGEE-C(Sx)-DY*[pY][pY]IWAGKKKK-Z (SEQ ID NO: 914), X-KKKK*E-C(Sx)-IYFFFG-Z (SEQ ID NO: 915), X-KKKRAHEEIY*F-C(Sx)-FWG-Z (SEQ ID NO: 916), X-KKKEEEIY*F-C(Sx)-FWG-Z (SEQ ID NO: 917), X-KKKKEEEIY*F-C(Sx)-FWG-Z (SEQ ID NO: 918), X-FTDRL-C(Sx)-QY*ISTRGLG-Z (SEQ ID NO: 919), X-FTDRLQQY*I-C(Sx)-TRGLG-Z (SEQ ID NO: 920), X-GC(Sx)-NY*RGYSLGNWV-Z (SEQ ID NO: 921), X-EEEIY*F-C(Sx)-FWG-Z (SEQ ID NO: 922), X-KKEEEIY*F-C(Sx)-FWG-Z (SEQ ID NO: 923), X-RAHEEIY*F-C(Sx)-FWG-Z (SEQ ID NO: 924); wherein X— is H or acetyl; and Z is OH or NH2.

[0105] In some embodiments, the metal-binding compound of the present invention is selected from the group consisting of: X-IENEEQEY*V-C(Sx)-TVKSS-Z (SEQ ID NO: 925), X-AVLADVSY*L-C(Sx)-AMEKS-Z (SEQ ID NO: 926), X-ARPLVEFY*E-C(Sx)-IKKYE-Z (SEQ ID NO: 927), X-FYEEIKKY*E-C(Sx)-LETEE-Z (SEQ ID NO: 928), X-DGDGQVNY*E-C(Sx)-FVQMM-Z (SEQ ID NO: 929), X-FDKDGNGY*I-C(Sx)-AAELR-Z (SEQ ID NO: 930), X-TQEQYELY*S-C(Sx)-MGSTF-Z (SEQ ID NO: 931), X-MAEEKKAY*K-C(Sx)-AKERE-Z (SEQ ID NO: 932), X-TDGEDADY*T-C(Sx)-FTNQQ-Z (SEQ ID NO: 933), X-SSHKGFHY*K-C(Sx)-G-Z (SEQ ID NO: 934), X-SSHKG-C(Sx)-HY*KH-Z (SEQ ID NO: 935), X-GGPEPGPY*A-C(Sx)-PSVNT-Z (SEQ ID NO: 936), X-RNEGVATY*A-C(Sx)-AVLFR-Z (SEQ ID NO: 937), X-DVVDADEY*L-C(Sx)-PQQGF-Z (SEQ ID NO: 938), X-DADEY*L-C(Sx)-PQQG-Z (SEQ ID NO: 939), X-EDSFLQRY*S-C(Sx)-DPTGA-Z (SEQ ID NO: 940), X-PVPEY*I-C(Sx)-QSV-Z (SEQ ID NO: 941), X-PVPEY*I-C(Sx)-QSV-Z (SEQ ID NO: 941), X-TFLPVPEY*I-C(Sx)-QSVPK-Z (SEQ ID NO: 942), X-TFLPV-C(Sx)-EY*INQSVPK-Z (SEQ ID NO: 943), X-ISLDNPDY*Q-C(Sx)-DFFPK-Z (SEQ ID NO: 944), X-AENAEY*L-C(Sx)-VA-Z (SEQ ID NO: 945), X-AENAEY*L-C(Sx)-VA-Z (SEQ ID NO: 945), X-STAENAEY*L-C(Sx)-VAPQS-Z (SEQ ID NO: 946), X-STAEN-C(Sx)-EY*LRVAPQS-Z (SEQ ID NO: 947), X-RLDGE-C(Sx)-IY*IRHSNLM-Z (SEQ ID NO: 948), X-NFANFSAY*P-C(Sx)-EEDMI-Z (SEQ ID NO: 949), X-KEVHKSGY*L-C(Sx)-SERLI-Z (SEQ ID NO: 950), X-LMLRLQDY*E-C(Sx)-KTKKA-Z (SEQ ID NO: 951), X-TEADGELY*V-C(Sx)-NTPSG-Z (SEQ ID NO: 952), X-MRHVSISY*D-C(Sx)-PPTPG-Z (SEQ ID NO: 953), X-SEELDENY*V-C(Sx)-MNPNS-Z (SEQ ID NO: 954), X-EPIQEANY*V-C(Sx)-MTPGT-Z (SEQ ID NO: 955), X-SHDSEENY*V-C(Sx)-MNPNL-Z (SEQ ID NO: 956), X-KGDKQVEY*L-C(Sx)-LDLDS-Z (SEQ ID NO: 957), X-VADERVDY*V-C(Sx)-VDQQK-Z (SEQ ID NO: 958), X-RNEEENIY*S-C(Sx)-PHDST-Z (SEQ ID NO: 959), X-SSTDR-C(Sx)-PY*EKVSAGN-Z (SEQ ID NO: 960), X-QLTFALRY*L-C(Sx)-FFTKA-Z (SEQ ID NO: 961), X-SSEPVGIY*Q-C(Sx)-FEKKT-Z (SEQ ID NO: 962), X-MQDNS-C(Sx)-TY*GKIWEGS-Z (SEQ ID NO: 963), X-TDVE-C(Sx)-TY*ADFIASG-Z (SEQ ID NO: 964), X-EGSFESRY*Q-C(Sx)-PFEDF-Z (SEQ ID NO: 965), X-IGTAE-C(Sx)-DY*GALYEGR-Z (SEQ ID NO: 966), X-EGRNPGFY*V-C(Sx)-ANPMP-Z (SEQ ID NO: 967), X-VTRRT-C(Sx)-DY*FL-Z (SEQ ID NO: 968), X-LHQEDNDY*I-C(Sx)-ASLIK-Z (SEQ ID NO: 969), X-LHQEDNDY*IN-C(Sx)-SLIK-Z (SEQ ID NO: 970), X-TVDGKEIY*N-C(Sx)-IRRKT-Z (SEQ ID NO: 971), X-TLMEKDSY*P-C(Sx)-FLKSP-Z (SEQ ID NO: 972), X-EEPPD-C(Sx)-QY*YNDFPGK-Z (SEQ ID NO: 973), X-EEPPD-C(Sx)-QY*[pY]NDFPGK-Z (SEQ ID NO: 974), X-EPPDHQYY*N-C(Sx)-FPGKE-Z (SEQ ID NO: 975), X-ELFDDPSY*V-C(Sx)-VQNLD-Z (SEQ ID NO: 795), X-GDGSD-C(Sx)-PY*YNSIPSK-Z (SEQ ID NO: 976), X-GDGSD-C(Sx)-PY*[pY]NSIPSK-Z (SEQ ID NO: 977), X-DGSDHPYY*N-C(Sx)-IPSKM-Z (SEQ ID NO: 978), X-FAGKE-C(Sx)-TY*YQGRHLG-Z (SEQ ID NO: 979), X-FAGKE-C(Sx)-TY*[pY]QGRHLG-Z (SEQ ID NO: 980), X-AGKEQTYY*Q-C(Sx)-RHLGD-Z (SEQ ID NO: 981), X-RQGSSDIY*S-C(Sx)-PEGKL-Z (SEQ ID NO: 982), X-PTGEAPTY*V-C(Sx)-TQQIP-Z (SEQ ID NO: 983), X-TENDDDVY*R-C(Sx)-LEELA-Z (SEQ ID NO: 984), X-HDLGEDIY*D-C(Sx)-VP-Z (SEQ ID NO: 985), X-HDLGEDIY*D-C(Sx)-VP-Z (SEQ ID NO: 985), X-EDGGDDIY*E-C(Sx)-IIKVE-Z (SEQ ID NO: 986), X-EDGGDDIY*E-C(Sx)-IIKVE-Z (SEQ ID NO: 986), X-RNEGVATY*A-C(Sx)-AVLFR-Z (SEQ ID NO: 937), X-SPQPEY*V-C(Sx)-QPDVR-Z (SEQ ID NO: 987), X-SPAFD-C(Sx)-LY*YWDQDPP-Z (SEQ ID NO: 988), X-SPAFD-C(Sx)-LY*[pY]WDQDPP-Z (SEQ ID NO: 989), X-PAFDNLYY*W-C(Sx)-QDPPE-Z (SEQ ID NO: 990), X-PTAENPEY*L-C(Sx)-LDVPV-Z (SEQ ID NO: 991), X-QALDNPEY*H-C(Sx)-ASNGP-Z (SEQ ID NO: 992); wherein X— is H or acetyl; and Z is OH or NH2.

[0106] In some embodiments, the metal-binding compound of the present invention is selected from the group consisting of: X-RRRAEEEEY*I-C(Sx)-LVA-Z (SEQ ID NO: 993), X-KKKAEEEEY*I-C(Sx)-LVA-Z (SEQ ID NO: 994), X-KKAEEEEY*I-C(Sx)-LVA-Z (SEQ ID NO: 995), X-KAEEEEY*I-C(Sx)-LVA-Z (SEQ ID NO: 996), X-EEPIY*V-C(Sx)-VP-Z (SEQ ID NO: 549), X-EEPIY*V-C(Sx)-IK-Z (SEQ ID NO: 536), X-EEPIY*V-C(Sx)-[Nle]P-Z (SEQ ID NO: 530), X-EEPIY*I-C(Sx)-VK-Z (SEQ ID NO: 499), X-EEPIY*V-C(Sx)-VK-Z (SEQ ID NO: 547), X-EEPIY*I-C(Sx)-WP-Z (SEQ ID NO: 503), X-EEPIY*V-C(Sx)-WK-Z (SEQ ID NO: 550), X-EEPDY*I-C(Sx)-VP-Z (SEQ ID NO: 382), X-EEPEY*I-C(Sx)-VP-Z (SEQ ID NO: 418), X-EEPDY*V-C(Sx)-MK-Z (SEQ ID NO: 390), X-DEQIY*W-C(Sx)-IA-Z (SEQ ID NO: 31), X-KKKDEQIY*W-C(Sx)-IA-Z (SEQ ID NO: 997), X-SSKRAKAKTTKKRPQRATS*N-C(Sx)-FS-Z (SEQ ID NO: 998), X-KAKTTKKRPQRATS*N-C(Sx)-FS-Z (SEQ ID NO: 999), X-KTTKKRPQRATS*N-C(Sx)-FS-Z (SEQ ID NO: 1000), X-KKRPQRATS*N-C(Sx)-FAM-Z (SEQ ID NO: 145), X-QETFS*D-C(Sx)-WKLLP-Z (SEQ ID NO: 1001), X-QE-C(Sx)-FS*DLWKLLP-Z (SEQ ID NO: 1002), X-VSGQL-C(Sx)-DS*MANSFVGTRSYKKK-Z (SEQ ID NO: 1003), X-KKKVSGQLIDS*M-C(Sx)-NSFVGTRSY-Z (SEQ ID NO: 1004), X-KKKVSGQLIDSM-C(Sx)-NS*FVGTRSY-Z (SEQ ID NO: 1005), X-KKKVSGQLIDSMANS*F-C(Sx)-GTRSY-Z (SEQ ID NO: 1006), X-KKCVSGQLIDS*M-C(Sx)-NSFVGTRSYCKK-Z (SEQ ID NO: 1007), X-KKCVSGQLIDSM-C(Sx)-NS*FVGTRSYCKK-Z (SEQ ID NO: 1008), X-GYAKDV-C(Sx)-QGS*LCTSFVGTLQYLAKKK-Z (SEQ ID NO: 1009), X-GYAKDVDQGS*L-C(Sx)-TSFVGTLQYLAKKK-Z (SEQ ID NO: 1010), X-GYAKDVDQGSL-C(Sx)-TS*FVGTLQYLAKKK-Z (SEQ ID NO: 1011), X-GYAKDVDQGSLCTS*F-C(Sx)-GTLQYLA-Z (SEQ ID NO: 1012), X-DLGYAKDV-C(Sx)-QGS*LCTSFVGTLQYLAPEKKK-Z (SEQ ID NO: 1013), X-DLGYAKDVDQGS*L-C(Sx)-TSFVGTLQYLAPE-Z (SEQ ID NO: 1014), X-DLGYAKDVDQGSL-C(Sx)-TS*FVGTLQYLAPE-Z (SEQ ID NO: 1015), X-DLGYAKDVDQGSLCTS*F-C(Sx)-GTLQYLAPE-Z (SEQ ID NO: 1016), X-KKCDLGYAKDVDQGS*L-C(Sx)-TSFVGTLQYLAPECKK-Z (SEQ ID NO: 1017), X-KKCDLGYAKDVDQGSL-C(Sx)-TS*FVGTLQYLAPECKK-Z (SEQ ID NO: 1018), X-C(Sx)LS*FRRR-Z (SEQ ID NO: 1019), X-GKKALRRQES*V-C(Sx)-ALGW-Z (SEQ ID NO: 1020), X-GNLLPMS*P-C(Sx)-EFD-Z (SEQ ID NO: 1021); wherein X— is H or acetyl; and Z is OH or NH2.

[0107] In some embodiments, the metal-binding compound of the present invention is selected from the group consisting of: X-IPTS*P-C(Sx)-TITYFFF-Z (SEQ ID NO: 209), X-I-C(Sx)-TS*PITITYFFF-Z (SEQ ID NO: 210), X-IPTS*P-C(Sx)-TITYFFFKKK-Z (SEQ ID NO: 211), X-VADQTPT*P-C(Sx)-RFLKN-Z (SEQ ID NO: 1022), X-VA-C(Sx)-QT*P[pT]PTRFLKN-Z (SEQ ID NO: 1023), X-IDQGDLMT*P-C(Sx)-FTPYY-Z (SEQ ID NO: 1024), X-IDQGD-C(Sx)-MT*PQFTPYY-Z (SEQ ID NO: 1025), X-TPPEELPS*P-C(Sx)-ASSLG-Z (SEQ ID NO: 1026), X-TPPEE-C(Sx)-PS*PSASSLG-Z (SEQ ID NO: 1027), X-NTIDLPMS*P-C(Sx)-TLDSL-Z (SEQ ID NO: 1028), X-NTIDL-C(Sx)-MS*PRTLDSL-Z (SEQ ID NO: 1029), X-KKKESTSAPLS*P-C(Sx)-VTITSP-Z (SEQ ID NO: 1030), X-GFLSRPLS*P-C(Sx)-FTTSP-Z (SEQ ID NO: 106), X-PSLLRPLS*P-C(Sx)-FFGAY-Z (SEQ ID NO: 107), X-KKKSTPSSPSS*P-C(Sx)-SSVAY-Z (SEQ ID NO: 1031), X-KKKSHGSAPLS*P-C(Sx)-APLTS-Z (SEQ ID NO: 1032), X-KKKSPFSVLSS*P-C(Sx)-SGHSN-Z (SEQ ID NO: 1033), X-TEERLPSS*P-C(Sx)-YEDAA-Z (SEQ ID NO: 1034), X-TEERL-C(Sx)-SS*PVYEDAA-Z (SEQ ID NO: 1035), X-SNGRRKRS*P-C(Sx)-QSFRF-Z (SEQ ID NO: 1036), X-SNGRR-C(Sx)-RS*PTQSFRF-Z (SEQ ID NO: 1037), X-EENVSDGS*P-C(Sx)-AGSVE-Z (SEQ ID NO: 1038), X-EENV-C(Sx)-DGS*PNAGSVE-Z (SEQ ID NO: 1039), X-APEKGLPT*P-C(Sx)-VLQRN-Z (SEQ ID NO: 1040), X-APEKG-C(Sx)-PT*PQVLQRN-Z (SEQ ID NO: 1041), X-LIDATGDT*P-C(Sx)-AEDDE-Z (SEQ ID NO: 1042), X-LIDAT-C(Sx)-DT*PGAEDDE-Z (SEQ ID NO: 1043), X-VEVDPMLT*P-C(Sx)-ERHLN-Z (SEQ ID NO: 1044), X-VEVDP-C(Sx)-LT*PEERHLN-Z (SEQ ID NO: 1045), X-EEYETPES*P-C(Sx)-PPARS-Z (SEQ ID NO: 1046), X-EEYET-C(Sx)-ES*PVPPARS-Z (SEQ ID NO: 1047), X-PAADAIMS*P-C(Sx)-EELDG-Z (SEQ ID NO: 1048), X-PAADA-C(Sx)-MS*PEEELDG-Z (SEQ ID NO: 1049), X-VLSRQITS*P-C(Sx)-SGING-Z (SEQ ID NO: 1050), X-VLSRQ-C(Sx)-TS*PVSGING-Z (SEQ ID NO: 1051), X-RSKSAPTS*P-C(Sx)-DQEIK-Z (SEQ ID NO: 1052), X-TPPQEHIS*P-C(Sx)-ITNEV-Z (SEQ ID NO: 1053), X-TPPQE-C(Sx)-IS*PQITNEV-Z (SEQ ID NO: 1054), X-LSTPVVLS*P-C(Sx)-PQKP-Z (SEQ ID NO: 1055), X-LSTPV-C(Sx)-LS*PGPQKP-Z (SEQ ID NO: 1056), X-QLSKWPGS*P-C(Sx)-SRSSD-Z (SEQ ID NO: 1057), X-KNIVTPRT*P-C(Sx)-PSQGK-Z (SEQ ID NO: 1058), X-KNIVT-C(Sx)-RT*PPPSQGK-Z (SEQ ID NO: 1059), X-SGVEVRVT*P-C(Sx)-RTEII-Z (SEQ ID NO: 1060), X-SGVEV-C(Sx)-VT*PTRTEII-Z (SEQ ID NO: 1061), X-SRRSGLSS*P-C(Sx)-YVAVT-Z (SEQ ID NO: 1062), X-SRRSG-C(Sx)-SS*PSYVAVT-Z (SEQ ID NO: 1063), X-TFDSLPSS*P-C(Sx)-SATPH-Z (SEQ ID NO: 1064), X-TFDSL-C(Sx)-SS*PSSATPH-Z (SEQ ID NO: 1065), X-PVVSGDTS*P-C(Sx)-HLSNV-Z (SEQ ID NO: 1066), X-PVVSG-C(Sx)-TS*PRHLSNV-Z (SEQ ID NO: 1067); wherein X— is H or acetyl; and Z is OH or NH2.

[0108] In some embodiments, the metal-binding compound of the present invention is selected from the group consisting of: X-PTIPGVTS*P-C(Sx)-SDEPP-Z (SEQ ID NO: 1068), X-SRSHSAKT*P-C(Sx)-FSVQS-Z (SEQ ID NO: 1069), X-GHVEEPAS*P-C(Sx)-AAYQK-Z (SEQ ID NO: 1070), X-QGPAPVGT*P-C(Sx)-FNRQH-Z (SEQ ID NO: 1071), X-LLSNASAT*P-C(Sx)-GRRGR-Z (SEQ ID NO: 1072), X-QARAKTQT*P-C(Sx)-VSPAP-Z (SEQ ID NO: 1073), X-QARAK-C(Sx)-QT*PPVSPAP-Z (SEQ ID NO: 1074), X-VSYEDPPT*A-C(Sx)-AAVEW-Z (SEQ ID NO: 1075), X-QMAGTPIT*P-C(Sx)-KDGFT-Z (SEQ ID NO: 1076), X-QMAGTPIT*P-C(Sx)-KDGFT-Z (SEQ ID NO: 1076), X-DADRSILS*P-C(Sx)-GSCGP-Z (SEQ ID NO: 1077), X-LVEKLPDS*P-C(Sx)-LAKKA-Z (SEQ ID NO: 1078), X-FGESPPLS*P-C(Sx)-DMDTQ-Z (SEQ ID NO: 1079), X-EVPDVTAT*P-C(Sx)-RLLFF-Z (SEQ ID NO: 1080), X-SAVNGTSS*A-C(Sx)-TNLEA-Z (SEQ ID NO: 1081), X-LGGLRISS*D-C(Sx)-SSDIE-Z (SEQ ID NO: 1082), X-LAGISRS*V-C(Sx)-VTVAY-Z (SEQ ID NO: 1083), X-NPQDSVGS*P-C(Sx)-SRVGE-Z (SEQ ID NO: 1084), X-KDEILPT*P-C(Sx)-SEQKG-Z (SEQ ID NO: 1085), X-KDEIL-C(Sx)-T*PISEQKG-Z (SEQ ID NO: 1086), X-HQLFRGFS*F-C(Sx)-AITSD-Z (SEQ ID NO: 1087), X-RGGPEPLS*P-C(Sx)-PVSPL-Z (SEQ ID NO: 1088), X-SGDYMPMS*P-C(Sx)-SVSAP-Z (SEQ ID NO: 1089), X-YMPMSPKS*V-C(Sx)-APQQI-Z (SEQ ID NO: 1090), X-QAATGFGS*P-C(Sx)-QYSAD-Z (SEQ ID NO: 1091), X-SFITPPIT*P-C(Sx)-LRRHT-Z (SEQ ID NO: 1092), X-TKLKPPRT*P-C(Sx)-PPSRK-Z (SEQ ID NO: 1093), X-ESPEKVS*P-C(Sx)-KICDF-Z (SEQ ID NO: 1094), X-GLSGRKSS*T-C(Sx)-SPTSP-Z (SEQ ID NO: 1095), X-PSVNPSIS*P-C(Sx)-HGVAR-Z (SEQ ID NO: 1096), X-YKRRYVET*P-C(Sx)-VHISS-Z (SEQ ID NO: 1097), X-NVRVSNGS*P-C(Sx)-LERMD-Z (SEQ ID NO: 1098), X-DDIEQWFT*E-C(Sx)-PGPDE-Z (SEQ ID NO: 1099), X-EPPPRPKT*P-C(Sx)-IFRAL-Z (SEQ ID NO: 1100), X-EPPPRPKT*P-C(Sx)-IFRAL-Z (SEQ ID NO: 1100), X-ARVSPPES*P-C(Sx)-ARAAA-Z (SEQ ID NO: 1101), X-ARVSPPES*P-C(Sx)-ARAAA-Z (SEQ ID NO: 1101), X-KKKLAPNPSFS*P-C(Sx)-PGFTP-Z (SEQ ID NO: 1102); wherein X— is H or acetyl; and Z is OH or NH2.

[0109] In some embodiments, the metal-binding compound of the present invention is selected from the group consisting of: X-EIRSRHSS*Y-C(Sx)-AGTED-Z (SEQ ID NO: 1103), X-SRDPVART*S-C(Sx)-LQTPA-Z (SEQ ID NO: 1104), X-PSWHLADS*P-C(Sx)-VNGAT-Z (SEQ ID NO: 1105), X-PTSPRRYS*P-C(Sx)-AKDLL-Z (SEQ ID NO: 1106), X-IHFWSSLS*P-C(Sx)-APLSP-Z (SEQ ID NO: 1107), X-LSPVAPLS*P-C(Sx)-RLQGP-Z (SEQ ID NO: 1108), X-PQPLRS*P-C(Sx)-LDNPT-Z (SEQ ID NO: 1109), X-GSASASGS*P-C(Sx)-DPGFM-Z (SEQ ID NO: 1110), X-RTDSLAAT*P-C(Sx)-AAK-Z (SEQ ID NO: 1111), X-RRVSGNNS*P-C(Sx)-LSNGG-Z (SEQ ID NO: 1112), X-RPASVNGS*P-C(Sx)-ATSES-Z (SEQ ID NO: 1113), X-PSRPPPPT*P-C(Sx)-RPASV-Z (SEQ ID NO: 1114), X-DRVSRSSS*P-C(Sx)-KTGEQ-Z (SEQ ID NO: 1115), X-PLKTGEQT*P-C(Sx)-HEHI-Z (SEQ ID NO: 1116), X-ATEEIYLT*P-C(Sx)-QRPPD-Z (SEQ ID NO: 1117), X-SNGH IT*P-C(Sx)-PTQFL-Z (SEQ ID NO: 1118), X-GHITITPT*P-C(Sx)-QFL-Z (SEQ ID NO: 1119), X-KKKSNGLVTIT*P-C(Sx)-SSQFL-Z (SEQ ID NO: 1120), X-PSAPALST*P-C(Sx)-IRDSA-Z (SEQ ID NO: 1121), X-SIMQQ-C(Sx)-DS*PHVVKYY-Z (SEQ ID NO: 1122), X-EYSLPALT*P-C(Sx)-LDEVK-Z (SEQ ID NO: 1123), X-RGSMAAPS*L-C(Sx)-PSLGP-Z (SEQ ID NO: 1124), X-KRKLP-C(Sx)-DT*PGQGLT-Z (SEQ ID NO: 1125), X-PRTSPIMS*P-C(Sx)-TSLAE-Z (SEQ ID NO: 1126), X-GKKATQAS*Q-C(Sx)-Y-Z (SEQ ID NO: 1127), X-NSKYNAES*T-C(Sx)-RESQD-Z (SEQ ID NO: 1128), X-SKYNAES*T-C(Sx)-RESQDT-Z (SEQ ID NO: 1129), X-SGYSSPGS*P-C(Sx)-TPGSR-Z (SEQ ID NO: 1130), X-GQSSAAAT*P-C(Sx)-TTGTK-Z (SEQ ID NO: 1131), X-ITGTKSNT*P-C(Sx)-SSVPS-Z (SEQ ID NO: 1132), X-TTGTK-C(Sx)-NT*PTSSVPS-Z (SEQ ID NO: 1133), X-SVPSAAVT*P-C(Sx)-NESLQ-Z (SEQ ID NO: 1134); wherein X— is H or acetyl; and Z is OH or NH2.

[0110] In some embodiments, the metal-binding compound of the present invention is selected from the group consisting of: X-SNTGQAIS*P-C(Sx)-MKRRI-Z (SEQ ID NO: 1135), X-SNTGQ-C(Sx)-IS*PGMKRRI-Z (SEQ ID NO: 1136), X-QSMVVPQT*P-C(Sx)-HTARV-Z (SEQ ID NO: 1137), X-QSMVV-C(Sx)-QT*PLHTARV-Z (SEQ ID NO: 1138), X-TTLHRNVS*P-C(Sx)-APQRP-Z (SEQ ID NO: 1139), X-TTLHR-C(Sx)-VS*PGAPQRP-Z (SEQ ID NO: 1140), X-SIKSEPIS*P-C(Sx)-RDRMT-Z (SEQ ID NO: 1141), X-SIKSE-C(Sx)-IS*PPRDRMT-Z (SEQ ID NO: 1142), X-DPRGDFHS*P-C(Sx)-VLGRP-Z (SEQ ID NO: 1143), X-DPRGD-C(Sx)-HS*PIVLGRP-Z (SEQ ID NO: 1144), X-PNTEDRES*P-C(Sx)-VKRMR-Z (SEQ ID NO: 1145), X-PNTED-C(Sx)-ES*PSVKRMR-Z (SEQ ID NO: 1146), X-KEHRG-C(Sx)-DS*PDPDTSY-Z (SEQ ID NO: 1147), X-PDTSYVLT*P-C(Sx)-TEEKY-Z (SEQ ID NO: 1148), X-PDTSY-C(Sx)-LT*PHTEEKY-Z (SEQ ID NO: 1149), X-SAKSR-C(Sx)-QT*APVPMPD-Z (SEQ ID NO: 1150), X-SAKSR-C(Sx)-QT*APVPMPD-Z (SEQ ID NO: 1150), X-STSVT-C(Sx)-HS*PSSPVGS-Z (SEQ ID NO: 1151), X-KMEVEELS*P-C(Sx)-ALGRF-Z (SEQ ID NO: 1152), X-S*T-C(Sx)-SEPLSPTSSLGE-Z (SEQ ID NO: 1153), X-GVRRRRLS*N-C(Sx)-SLTGV-Z (SEQ ID NO: 1154), X-GVRRR-C(Sx)-LS*NVSLTGV-Z (SEQ ID NO: 1155), X-RRRLSNVS*L-C(Sx)-GVSTI-Z (SEQ ID NO: 1156), X-RRRLS-C(Sx)-VS*LTGVSTI-Z (SEQ ID NO: 1157), X-GREKRSNS*Q-C(Sx)-YIGRP-Z (SEQ ID NO: 1158), X-GREKR-C(Sx)-NS*QSYIGRP-Z (SEQ ID NO: 1159), X-EDANRTIS*P-C(Sx)-TSNNI-Z (SEQ ID NO: 1160), X-EDANRTISP-C(Sx)-TS*NNI-Z (SEQ ID NO: 1161), X-RTISPSTS*N-C(Sx)-IPLMR-Z (SEQ ID NO: 1162), X-RTISP-C(Sx)-TS*NNIPLMR-Z (SEQ ID NO: 1163), X-GEKSFRRS*V-C(Sx)-GTPAY-Z (SEQ ID NO: 1164), X-GEKSF-C(Sx)-RS*VVGTPAY-Z (SEQ ID NO: 1165), X-EPGPVPSS*P-C(Sx)-QEPPT-Z (SEQ ID NO: 1166), X-PLQRQPSS*P-C(Sx)-PTPRN-Z (SEQ ID NO: 1167); wherein X— is H or acetyl; and Z is OH or NH2.

[0111] In some embodiments, the metal-binding compound of the present invention is selected from the group consisting of: X-YSHKGHLS*E-C(Sx)-LVTKW-Z (SEQ ID NO: 1168), X-PPYNRAVS*L-C(Sx)-SPVSV-Z (SEQ ID NO: 1169), X-PDVEMPS*P-C(Sx)-APSGD-Z (SEQ ID NO: 1170), X-SRLRD-C(Sx)-PS*APLEAPE-Z (SEQ ID NO: 1171), X-DPLPP-C(Sx)-FS*GTPKGSG-Z (SEQ ID NO: 1172), X-VKAEPAHT*A-C(Sx)-SVAAK-Z (SEQ ID NO: 1173), X-DSLSYYHS*P-C(Sx)-DSFSS-Z (SEQ ID NO: 1174), X-SALQGFNS*P-C(Sx)-MLSLG-Z (SEQ ID NO: 1175), X-LTDPRLLS*P-C(Sx)-QPALQ-Z (SEQ ID NO: 1176), X-VNTRA-C(Sx)-PS*QHSSPAV-Z (SEQ ID NO: 1177), X-QHSSPAVS*D-C(Sx)-LPSNS-Z (SEQ ID NO: 1178), X-AVSDSLPS*N-C(Sx)-LKKSS-Z (SEQ ID NO: 1179), X-SNSLKKSS*A-C(Sx)-LKKIL-Z (SEQ ID NO: 1180), X-LPGPPS*P-C(Sx)-SDAES-Z (SEQ ID NO: 1181), X-SPLSDPSS*P-C(Sx)-ASEDF-Z (SEQ ID NO: 1182), X-ANPSPPPS*P-C(Sx)-QQINL-Z (SEQ ID NO: 1183), X-AHEGV-C(Sx)-LS*VPEYRSR-Z (SEQ ID NO: 1184), X-EKGPEGVS*P-C(Sx)-QAHLH-Z (SEQ ID NO: 1185), X-GPEDQAVT*E-C(Sx)-VATRW-Z (SEQ ID NO: 1186), X-GGSSGT*S-C(Sx)-EKGPE-Z (SEQ ID NO: 1187), X-DPQLPSRT*P-C(Sx)-QGPRP-Z (SEQ ID NO: 1188), X-APEVL-C(Sx)-SS*HRYTLGV-Z (SEQ ID NO: 1189), X-RADPQ-C(Sx)-PS*RTPVQGP-Z (SEQ ID NO: 1190), X-SSKRAKAKTTKKRPQRATS*N-C(Sx)-FS-Z (SEQ ID NO: 998), X-KAKTTKKRPQRATS*N-C(Sx)-FS-Z (SEQ ID NO: 999), X-KTTKKRPQRATS*N-C(Sx)-FS-Z (SEQ ID NO: 1000), X-KKRPQRATS*N-C(Sx)-FAM-Z (SEQ ID NO: 145), X-QETFS*D-C(Sx)-WKLLP-Z (SEQ ID NO: 1001), X-QE-C(Sx)-FS*DLWKLLP-Z (SEQ ID NO: 1002), X-GYAKDVDQGSL-C(Sx)-TS*FVGTLQYLAKKK-Z (SEQ ID NO: 1011), X-GYAKDVDQGS*L-C(Sx)-TSFVGTLQYLAKKK-Z (SEQ ID NO: 1010), X-R-C(Sx)-FS*LRRKAK-Z (SEQ ID NO: 1191), X-A-C(Sx)-KTPKKAKKP-Z (SEQ ID NO: 1192), X-I-C(Sx)-TS*PITI-YFFFKKK-Z (SEQ ID NO: 1193), X-WD-C(Sx)-DS*DDDDDAAA-Z (SEQ ID NO: 1194), X-WD-C(Sx)-DS*DDDDDAAAKKK-Z (SEQ ID NO: 1195), X-VSGQL-C(Sx)-DS*MANSFVGTRSYKKK-Z (SEQ ID NO: 1003), X-KKKVSGQLIDSM-C(Sx)-NS*FVGTRSY-Z (SEQ ID NO: 1005), KKKVSGQLIDS*M-C(Sx)-NSFVGTRSY-Z (SEQ ID NO: 1004), X-KKKVSGQLIDSMANSF-C(Sx)-GT*RSY-Z (SEQ ID NO: 1196), X-KKKVSGQLIDSMANS*F-C(Sx)-GTRSY-Z (SEQ ID NO: 1006), X-QYHFVASSST*I-C(Sx)-RDRQRPYS-Z (SEQ ID NO: 1197), X-QYHFVAS-C(Sx)-ST*IERDRQRPYS-Z (SEQ ID NO: 1198), X-DANPLMANGT*L-C(Sx)-RRHQNGRF-Z (SEQ ID NO: 1199), X-DANPLMA-C(Sx)-GT*LTRRHQNGRF-Z (SEQ ID NO: 1200), X-DANPLM-C(Sx)-NGT*LTRRHQNGRF-Z (SEQ ID NO: 1201), X-DANPLMA-C(Sx)-GT*LARRHQNGRF-Z (SEQ ID NO: 1202), X-DANPLM-C(Sx)-NGT*LARRHQNGRF-Z (SEQ ID NO: 1203); wherein X— is H or acetyl; and Z is OH or NH2.

[0112] In some embodiments, the metal-binding compound of the present invention is selected from the group consisting of: X-[Nle]AKTTKKRPQRATS*N-C(Sx)-FS-Z (SEQ ID NO: 1204), X-[Nle]AKITKKRPQRATSN-C(Sx)-FS*-Z (SEQ ID NO: 1205), X-[Nle]ANPLMA-C(Sx)-GT*LTRRHQNGRF-Z (SEQ ID NO: 1206), X-[Nle]-C(Sx)-DS*LRRKAK-Z (SEQ ID NO: 1207), X-[Nle]-C(Sx)-LS*PGPF-Z (SEQ ID NO: 1208), X-[Nle]KRPQRAT*S-C(Sx)-VFAMF-Z (SEQ ID NO: 1209), X-[Nle]LLR-C(Sx)-SS*RRIRR-Z (SEQ ID NO: 1210), X-[Nle]LPWWR-C(Sx)-YT*WVVERDVNTKQR-Z (SEQ ID NO: 1211), X-[Nle]QREGFGRQS*M-C(Sx)-EKR-Z (SEQ ID NO: 1212), X-[Nle]RR-C(Sx)-AS*FRRR-Z (SEQ ID NO: 1213), X-AA-C(Sx)-IS*PLGALQHGFFR-Z (SEQ ID NO: 1214), X-AANPLMA-C(Sx)-GT*LTRRHQNGRF-Z (SEQ ID NO: 1215), X-A-C(Sx)-DS*LRRKAK-Z (SEQ ID NO: 1216), X-A-C(Sx)-IS*PLGALQHGFFR-Z (SEQ ID NO: 1217), X-A-C(Sx)-KT*PKKAKKP-Z (SEQ ID NO: 1218), X-A-C(Sx)-LS*PGPF-Z (SEQ ID NO: 1219), X-ADPDHDHT*G-C(Sx)-LTEYVATRWRR-Z (SEQ ID NO: 1220), X-ADPDHDHTG-C(Sx)-LT*EYVATRWRR-Z (SEQ ID NO: 1221), X-AE-C(Sx)-QS*LNAADVENLHLPL-Z (SEQ ID NO: 1222), X-AESQS*L-C(Sx)-AADVENLHLPL-Z (SEQ ID NO: 1223), X-AFRLER-C(Sx)-DS*IFYPRR-Z (SEQ ID NO: 1224), X-AGTS*F-C(Sx)-[Nle]TP[pY]VVTRKKK-Z (SEQ ID NO: 1225), X-AGTS*F-C(Sx)-[Nle]TPYVVTRKKK-Z (SEQ ID NO: 1226), X-AGTSF-C(Sx)-[Nle]T*P[pY]VVTRKKK-Z (SEQ ID NO: 1227), X-AGTSF-C(Sx)-[Nle]T*PYVVTRKKK-Z (SEQ ID NO: 1228), X-AHEGV-C(Sx)-LS*VPEYRSR-Z (SEQ ID NO: 1184), X-AHLQRQLS*I-C(Sx)-EN-Z (SEQ ID NO: 1229), X-AHLQRQLS*I-C(Sx)-EP-Z (SEQ ID NO: 1230), X-AHLQRQLS*I-C(Sx)-FA-Z (SEQ ID NO: 1231), X-AHLQRQLS*I-C(Sx)-FS-Z (SEQ ID NO: 1232), X-AHLQRQLS*I-C(Sx)-HH-Z (SEQ ID NO: 1233), X-AHLQRQLSI-C(Sx)-FS*-Z (SEQ ID NO: 1234), X-AKRPQRAT*S-C(Sx)-VFA-Z (SEQ ID NO: 1235), X-AKRPQRAT*S-C(Sx)-VF-Z (SEQ ID NO: 1236), X-AKRPQRATS*N-C(Sx)-FA-Z (SEQ ID NO: 1237), X-AKRPQRATS*N-C(Sx)-F-Z (SEQ ID NO: 1238), X-AKRRRLAS*L-C(Sx)-ASTSK-Z (SEQ ID NO: 130), X-AKRRRLASL-C(Sx)-AS*TSK-Z (SEQ ID NO: 1239), X-ALKLSRYS*F-C(Sx)-ITAK-Z (SEQ ID NO: 1240), X-ALKLSRYSF-C(Sx)-IT*AK-Z (SEQ ID NO: 1241), X-ALLR-C(Sx)-SS*RRIRR-Z (SEQ ID NO: 1242), X-ALPWWR-C(Sx)-YT*WVVERDVNTKQR-Z (SEQ ID NO: 1243), X-ALRRAS*L-C(Sx)-AA-Z (SEQ ID NO: 1244), X-ALRRFS*L-C(Sx)-GA-Z (SEQ ID NO: 1245), X-AP-C(Sx)-PS*QAMDDLMLSPDD-Z (SEQ ID NO: 1246), and X-APEKG-C(Sx)-PT*PQVLQRN-Z (SEQ ID NO: 1041); wherein X is H or acetyl; and Z is OH or NH2.

[0113] In some embodiments, the metal-binding compound of the present invention is selected from the group consisting of: X-APEKGLPT*P-C(Sx)-VLQRN-Z (SEQ ID NO: 1040), X-APEVL-C(Sx)-SS*HRYTLGV-Z (SEQ ID NO: 1189), X-APPSEET*P-C(Sx)-IPQRS-Z (SEQ ID NO: 1247), X-AQAEGFGRQS*[Nle]-C(Sx)-EKR[pT]K-Z (SEQ ID NO: 1248), X-AQAEGFGRQS*[Nle]-C(Sx)-EKRTK-Z (SEQ ID NO: 1249), X-AQAEGFGRQS*M-C(Sx)-EKR[pT]K-Z (SEQ ID NO: 1250), X-AQAEGFGRQS*M-C(Sx)-EKRTK-Z (SEQ ID NO: 1251), X-AQREGFGRQS*M-C(Sx)-EKR-Z (SEQ ID NO: 1252), X-AR-C(Sx)-LS*FAEG-Z (SEQ ID NO: 1253), X-AR-C(Sx)-LS*FAEPG-Z (SEQ ID NO: 1254), X-ARKRERAYS*[Nle][dP]-C(Sx)-G-Z (SEQ ID NO: 1255), X-ARKRERAYS*[Nle]-C(Sx)-G-Z (SEQ ID NO: 1256), X-ARKRERAYS*A-C(Sx)-G-Z (SEQ ID NO: 1257), X-ARKRERAYS*E[dP]-C(Sx)-G-Z (SEQ ID NO: 1258), X-ARKRERAYS*F[dP]-C(Sx)-G-Z (SEQ ID NO: 1259), X-ARKRERAYS*FA-C(Sx)-G-Z (SEQ ID NO: 1260), X-ARKRERAYS*F-C(Sx)-G-Z (SEQ ID NO: 1261), X-ARKRERAYS*FD-C(Sx)-G-Z (SEQ ID NO: 1262), X-ARKRERAYS*FE-C(Sx)-G-Z (SEQ ID NO: 1263), X-ARKRERAYS*FF-C(Sx)-G-Z (SEQ ID NO: 1264), X-ARKRERAYS*FG-C(Sx)-G-Z (SEQ ID NO: 1265), X-ARKRERAYS*FH-C(Sx)-G-Z (SEQ ID NO: 1266), X-ARKRERAYS*FI-C(Sx)-G-Z (SEQ ID NO: 1267), X-ARKRERAYS*FK-C(Sx)-G-Z (SEQ ID NO: 1268), X-ARKRERAYS*FL-C(Sx)-G-Z (SEQ ID NO: 1269), X-ARKRERAYS*FN-C(Sx)-G-Z (SEQ ID NO: 1270), X-ARKRERAYS*FP-C(Sx)-G-Z (SEQ ID NO: 1271), X-ARKRERAYS*FQ-C(Sx)-G-Z (SEQ ID NO: 1272), X-ARKRERAYS*FR-C(Sx)-G-Z (SEQ ID NO: 1273), X-ARKRERAYS*FV-C(Sx)-G-Z (SEQ ID NO: 1274), X-ARKRERAYS*FW-C(Sx)-G-Z (SEQ ID NO: 1275), X-ARKRERAYS*G[dP]-C(Sx)-G-Z (SEQ ID NO: 1276), X-ARKRERAYS*G-C(Sx)-G-Z (SEQ ID NO: 1277), X-ARKRERAYS*GG-C(Sx)-G-Z (SEQ ID NO: 1278), X-ARKRERAYS*H[dP]-C(Sx)-G-Z (SEQ ID NO: 1279), X-ARKRERAYS*H-C(Sx)-G-Z (SEQ ID NO: 1280), X-ARKRERAYS*I[dP]-C(Sx)-G-Z (SEQ ID NO: 1281), X-ARKRERAYS*I-C(Sx)-G-Z (SEQ ID NO: 1282), X-ARKRERAYS*K[dP]-C(Sx)-G-Z (SEQ ID NO: 1283), X-ARKRERAYS*K-C(Sx)-G-Z (SEQ ID NO: 1284), X-ARKRERAYS*L[dP]-C(Sx)-G-Z (SEQ ID NO: 1285), X-ARKRERAYS*L-C(Sx)-G-Z (SEQ ID NO: 1286), X-ARKRERAYS*N-C(Sx)-G-Z (SEQ ID NO: 1287), X-ARKRERAYS*P-C(Sx)-G-Z (SEQ ID NO: 1288), X-ARKRERAYS*Q[dP]-C(Sx)-G-Z (SEQ ID NO: 1289), X-ARKRERAYS*Q-C(Sx)-G-Z (SEQ ID NO: 1290), X-ARKRERAYS*R[dP]-C(Sx)-G-Z (SEQ ID NO: 1291), X-ARKRERAYS*R-C(Sx)-G-Z (SEQ ID NO: 1292), X-ARKRERAYS*V[dP]-C(Sx)-G-Z (SEQ ID NO: 1293), X-ARKRERAYS*V-C(Sx)-G-Z (SEQ ID NO: 1294), X-ARKRERAYS*W[dP]-C(Sx)-G-Z (SEQ ID NO: 1295), X-ARKRERAYS*W-C(Sx)-G-Z (SEQ ID NO: 1296), X-ARKRERAYSN[dP]-C(Sx)-G-Z (SEQ ID NO: 1297), X-ARKRERAYSP[dP]-C(Sx)-G-Z (SEQ ID NO: 1298), X-ARKRRRHPS*G-C(Sx)-PTA-Z (SEQ ID NO: 1299), and X-ARR-C(Sx)-AS*FRRR-Z (SEQ ID NO: 1300); wherein X— is H or acetyl; and Z is OH or NH2.

[0114] In some embodiments, the metal-binding compound of the present invention is selected from the group consisting of: X-ART*K-C(Sx)-TARKSTGGKAPRK-Z (SEQ ID NO: 1301), X-ART*K-C(Sx)-TARKSTGGK-Z (SEQ ID NO: 1302), X-ARTKQT*A-C(Sx)-KSTGGKAPRK-Z (SEQ ID NO: 1303), X-ARTKQT*A-C(Sx)-KSTGGK-Z (SEQ ID NO: 1304), X-ARTKQTARKS*T-C(Sx)-GKAPRK-Z (SEQ ID NO: 1305), X-ARTKQTARKS*T-C(Sx)-GK-Z (SEQ ID NO: 1306), X-ARVS*P-C(Sx)-ESPRARAAA-Z (SEQ ID NO: 1307), X-ARVSP-C(Sx)-ES*PRARAAA-Z (SEQ ID NO: 1308), X-ARVSPPES*P-C(Sx)-ARAAA-Z (SEQ ID NO: 1101), X-ATEEIYLT*P-C(Sx)-QRPPD-Z (SEQ ID NO: 1117), X-AVSDSLPS*N-C(Sx)-LKKSS-Z (SEQ ID NO: 1179), X-C(Sx)-[Nle]S*LRRKAK-Z (SEQ ID NO: 1309), X-C(Sx)-AS*LRRKAK-Z (SEQ ID NO: 1310), X-C(Sx)-DS*LRRKAK-Z (SEQ ID NO: 1311), X-C(Sx)-ES*LRRKAK-Z (SEQ ID NO: 1312), X-C(Sx)-ES*QEAFADLWKK-Z (SEQ ID NO: 1313), X-C(Sx)-ES*QETFSDLWKK-Z (SEQ ID NO: 1314), X-C(Sx)-FS*[Nle]RRKAK-Z (SEQ ID NO: 1315), X-C(Sx)-FS*ARRKAK-Z (SEQ ID NO: 1316), X-C(Sx)-FS*DRRKAK-Z (SEQ ID NO: 1317), X-C(Sx)-FS*ERRKAK-Z (SEQ ID NO: 1318), X-C(Sx)-FS*FRRKAK-Z (SEQ ID NO: 1319), X-C(Sx)-FS*GRRKAK-Z (SEQ ID NO: 1320), X-C(Sx)-FS*HRRKAK-Z (SEQ ID NO: 1321), X-C(Sx)-FS*IRRKAK-Z (SEQ ID NO: 1322), X-C(Sx)-FS*KRRKAK-Z (SEQ ID NO: 1323), X-C(Sx)-FS*L[Nle]RKAK-Z (SEQ ID NO: 1324), X-C(Sx)-FS*LARKAK-Z (SEQ ID NO: 1325), X-C(Sx)-FS*LDRKAK-Z (SEQ ID NO: 1326), X-C(Sx)-FS*LERKAK-Z (SEQ ID NO: 1327), X-C(Sx)-FS*LFRKAK-Z (SEQ ID NO: 1328), X-C(Sx)-FS*LGRKAK-Z (SEQ ID NO: 1329), X-C(Sx)-FS*LHRKAK-Z (SEQ ID NO: 1330), X-C(Sx)-FS*LIRKAK-Z (SEQ ID NO: 1331), X-C(Sx)-FS*LKRKAK-Z (SEQ ID NO: 1332), X-C(Sx)-FS*LLRKAK-Z (SEQ ID NO: 1333), X-C(Sx)-FS*LNRKAK-Z (SEQ ID NO: 1334), X-C(Sx)-FS*LPRGAK-Z (SEQ ID NO: 1335), X-C(Sx)-FS*LPRKAK-Z (SEQ ID NO: 1336), X-C(Sx)-FS*LQRKAK-Z (SEQ ID NO: 1337), X-C(Sx)-FS*LR[Nle]KAK-Z (SEQ ID NO: 1338), X-C(Sx)-FS*LRAKAK-Z (SEQ ID NO: 1339), X-C(Sx)-FS*LRDKAK-Z (SEQ ID NO: 1340), X-C(Sx)-FS*LREKAK-Z (SEQ ID NO: 1341), X-C(Sx)-FS*LRFKAK-Z (SEQ ID NO: 1342), X-C(Sx)-FS*LRGKAK-Z (SEQ ID NO: 1343), X-C(Sx)-FS*LRHKAK-Z (SEQ ID NO: 1344), X-C(Sx)-FS*LRIKAK-Z (SEQ ID NO: 1345), X-C(Sx)-FS*LRKKAK-Z (SEQ ID NO: 1346), X-C(Sx)-FS*LRLKAK-Z (SEQ ID NO: 1347), X-C(Sx)-FS*LRNKAK-Z (SEQ ID NO: 1348), X-C(Sx)-FS*LRPKAK-Z (SEQ ID NO: 1349), X-C(Sx)-FS*LRQKAK-Z (SEQ ID NO: 1350), X-C(Sx)-FS*LRR[Nle]AK-Z (SEQ ID NO: 1351), X-C(Sx)-FS*LRRAAK-Z (SEQ ID NO: 1352), X-C(Sx)-FS*LRRDAK-Z (SEQ ID NO: 1353), X-C(Sx)-FS*LRREAK-Z (SEQ ID NO: 1354), X-C(Sx)-FS*LRRFAK-Z (SEQ ID NO: 1355), X-C(Sx)-FS*LRRGAK-Z (SEQ ID NO: 1356), X-C(Sx)-FS*LRRHAK-Z (SEQ ID NO: 1357), X-C(Sx)-FS*LRRIAK-Z (SEQ ID NO: 1358), X-C(Sx)-FS*LRRK[Nle]K-Z (SEQ ID NO: 1359), and X-C(Sx)-FS*LRRKA[Nle]-Z (SEQ ID NO: 1360); wherein X is H or acetyl; and Z is OH or NH2.

[0115] In some embodiments, the metal-binding compound of the present invention is selected from the group consisting of: X-C(Sx)-FS*LRRKAA-Z (SEQ ID NO: 1361), X-C(Sx)-FS*LRRKAD-Z (SEQ ID NO: 1362), X-C(Sx)-FS*LRRKAE-Z (SEQ ID NO: 1363), X-C(Sx)-FS*LRRKAF-Z (SEQ ID NO: 1364), X-C(Sx)-FS*LRRKAG-Z (SEQ ID NO: 1365), X-C(Sx)-FS*LRRKAH-Z (SEQ ID NO: 1366), X-C(Sx)-FS*LRRKAI-Z (SEQ ID NO: 1367), X-C(Sx)-FS*LRRKAL-Z (SEQ ID NO: 1368), X-C(Sx)-FS*LRRKAN-Z (SEQ ID NO: 1369), X-C(Sx)-FS*LRRKAP-Z (SEQ ID NO: 1370), X-C(Sx)-FS*LRRKAQ-Z (SEQ ID NO: 1371), X-C(Sx)-FS*LRRKAR-Z (SEQ ID NO: 1372), X-C(Sx)-FS*LRRKAV-Z (SEQ ID NO: 1373), X-C(Sx)-FS*LRRKAW-Z (SEQ ID NO: 1374), X-C(Sx)-FS*LRRKDK-Z (SEQ ID NO: 1375), X-C(Sx)-FS*LRRKEK-Z (SEQ ID NO: 1376), X-C(Sx)-FS*LRRKFK-Z (SEQ ID NO: 1377), X-C(Sx)-FS*LRRKGK-Z (SEQ ID NO: 1378), X-C(Sx)-FS*LRRKHK-Z (SEQ ID NO: 1379), X-C(Sx)-FS*LRRKIK-Z (SEQ ID NO: 1380), X-C(Sx)-FS*LRRKKK-Z (SEQ ID NO: 1381), X-C(Sx)-FS*LRRKLK-Z (SEQ ID NO: 1382), X-C(Sx)-FS*LRRKNK-Z (SEQ ID NO: 1383), X-C(Sx)-FS*LRRKPK-Z (SEQ ID NO: 1384), X-C(Sx)-FS*LRRKQK-Z (SEQ ID NO: 1385), X-C(Sx)-FS*LRRKRK-Z (SEQ ID NO: 1386), X-C(Sx)-FS*LRRKVK-Z (SEQ ID NO: 1387), X-C(Sx)-FS*LRRKWK-Z (SEQ ID NO: 1388), X-C(Sx)-FS*LRRLAK-Z (SEQ ID NO: 1389), X-C(Sx)-FS*LRRNAK-Z (SEQ ID NO: 1390), X-C(Sx)-FS*LRRPAK-Z (SEQ ID NO: 1391), X-C(Sx)-FS*LRRQAK-Z (SEQ ID NO: 1392), X-C(Sx)-FS*LRRRAK-Z (SEQ ID NO: 1393), X-C(Sx)-FS*LRRVAK-Z (SEQ ID NO: 1394), X-C(Sx)-FS*LRRWAK-Z (SEQ ID NO: 1395), X-C(Sx)-FS*LRVKAK-Z (SEQ ID NO: 1396), X-C(Sx)-FS*LRWKAK-Z (SEQ ID NO: 1397), X-C(Sx)-FS*LVRKAK-Z (SEQ ID NO: 1398), X-C(Sx)-FS*LWRKAK-Z (SEQ ID NO: 1399), X-C(Sx)-FS*NRRKAK-Z (SEQ ID NO: 1400), X-C(Sx)-FS*PRRKAK-Z (SEQ ID NO: 1401), X-C(Sx)-FS*QRRKAK-Z (SEQ ID NO: 1402), X-C(Sx)-FS*RRRKAK-Z (SEQ ID NO: 1403), X-C(Sx)-FS*VRRKAK-Z (SEQ ID NO: 1404), X-C(Sx)-FS*WRRKAK-Z (SEQ ID NO: 1405), X-C(Sx)-GS*LRRKAK-Z (SEQ ID NO: 1406), X-C(Sx)-HS*LKRGNR-Z (SEQ ID NO: 1407), X-C(Sx)-HS*LKRKNR-Z (SEQ ID NO: 1408), X-C(Sx)-HS*LPRFNR-Z (SEQ ID NO: 1409), X-C(Sx)-HS*LPRKNK-Z (SEQ ID NO: 1410), X-C(Sx)-HS*LRRKAK-Z (SEQ ID NO: 1411), X-C(Sx)-IS*LRRKAK-Z (SEQ ID NO: 1412), X-C(Sx)-KS*LRRKAK-Z (SEQ ID NO: 1413), X-C(Sx)-KS*PAKEKAKSPEK-Z (SEQ ID NO: 1414), X-C(Sx)-LS*FAEG-Z (SEQ ID NO: 1415), X-C(Sx)-LS*FAEPG-Z (SEQ ID NO: 1416), X-C(Sx)-LS*FRRR-Z (SEQ ID NO: 1019), X-C(Sx)-LS*LRRKAK-Z (SEQ ID NO: 1417), X-C(Sx)-LS*QEAFADLWKK-Z (SEQ ID NO: 1418), X-C(Sx)-NS*LRRKAK-Z (SEQ ID NO: 1419), X-C(Sx)-PS*LRRKAK-Z (SEQ ID NO: 1420), X-C(Sx)-QS*LRRKAK-Z (SEQ ID NO: 1421), X-C(Sx)-QS*QEAFADLWKK-Z (SEQ ID NO: 1422), X-C(Sx)-QS*QETFS*DLWKK-Z (SEQ ID NO: 1423), and X-C(Sx)-RS*LRRKAK-Z (SEQ ID NO: 1424); wherein X— is H or acetyl; and Z is OH or NH2.

[0116] In some embodiments, the metal-binding compound of the present invention is selected from the group consisting of: X-C(Sx)-RT*KQTARKSTGGKAPRK-Z (SEQ ID NO: 1425), X-C(Sx)-RT*KQTARKSTGGK-Z (SEQ ID NO: 1426), X-C(Sx)-VS*LRRKAK-Z (SEQ ID NO: 1427), X-C(Sx)-WS*LRRKAK-Z (SEQ ID NO: 1428), X-D[Nle]NPLMA-C(Sx)-GT*LTRRHQNGRF-Z (SEQ ID NO: 1429), X-DA[Nle]PLMA-C(Sx)-GT*LTRRHQNGRF-Z (SEQ ID NO: 1430), X-DAAPLMA-C(Sx)-GT*LTRRHQNGRF-Z (SEQ ID NO: 1431), X-DADPLMA-C(Sx)-GT*LTRRHQNGRF-Z (SEQ ID NO: 1432), X-DADRSILS*P-C(Sx)-GSSGP-Z (SEQ ID NO: 1433), X-DADRSILSP-C(Sx)-GS*SGP-Z (SEQ ID NO: 1434), X-DAEPLMA-C(Sx)-GT*LTRRHQNGRF-Z (SEQ ID NO: 1435), X-DAFPLMA-C(Sx)-GT*LTRRHQNGRF-Z (SEQ ID NO: 1436), X-DAGPLMA-C(Sx)-GT*LTRRHQNGRF-Z (SEQ ID NO: 1437), X-DAHPLMA-C(Sx)-GT*LTRRHQNGRF-Z (SEQ ID NO: 1438), X-DAIPLMA-C(Sx)-GT*LTRRHQNGRF-Z (SEQ ID NO: 1439), X-DAKPLMA-C(Sx)-GT*LTRRHQNGRF-Z (SEQ ID NO: 1440), X-DAKTTKKRPQRATS*N-C(Sx)-FS-Z (SEQ ID NO: 1441), X-DAKTTKKRPQRATSN-C(Sx)-FS*-Z (SEQ ID NO: 1442), X-DALPLMA-C(Sx)-GT*LTRRHQNGRF-Z (SEQ ID NO: 1443), X-DAN[Nle]LMA-C(Sx)-GT*LTRRHQNGRF-Z (SEQ ID NO: 1444), X-DANALMA-C(Sx)-GT*LTRRHQNGRF-Z (SEQ ID NO: 1445), X-DANDLMA-C(Sx)-GT*LTRRHQNGRF-Z (SEQ ID NO: 1446), X-DANELMA-C(Sx)-GT*LTRRHQNGRF-Z (SEQ ID NO: 1447), X-DANFLMA-C(Sx)-GT*LTRRHQNGRF-Z (SEQ ID NO: 1448), X-DANGLMA-C(Sx)-GT*LTRRHQNGRF-Z (SEQ ID NO: 1449), X-DANHLMA-C(Sx)-GT*LTRRHQNGRF-Z (SEQ ID NO: 1450), X-DANILMA-C(Sx)-GT*LTRRHQNGRF-Z (SEQ ID NO: 1451), X-DANKLMA-C(Sx)-GT*LTRRHQNGRF-Z (SEQ ID NO: 1452), X-DANLLMA-C(Sx)-GT*LTRRHQNGRF-Z (SEQ ID NO: 1453), X-DANNLMA-C(Sx)-GT*LTRRHQNGRF-Z (SEQ ID NO: 1454), X-DANP[Nle]MA-C(Sx)-GT*LTRRHQNGRF-Z (SEQ ID NO: 1455), X-DANPAMA-C(Sx)-GT*LTRRHQNGRF-Z (SEQ ID NO: 1456), X-DANPDMA-C(Sx)-GT*LTRRHQNGRF-Z (SEQ ID NO: 1457), X-DANPEMA-C(Sx)-GT*LTRRHQNGRF-Z (SEQ ID NO: 1458), X-DANPFMA-C(Sx)-GT*LTRRHQNGRF-Z (SEQ ID NO: 1459), X-DANPGMA-C(Sx)-GT*LTRRHQNGRF-Z (SEQ ID NO: 1460), X-DANPHMA-C(Sx)-GT*LTRRHQNGRF-Z (SEQ ID NO: 1461), X-DANPIMA-C(Sx)-GT*LTRRHQNGRF-Z (SEQ ID NO: 1462), X-DANPKMA-C(Sx)-GT*LTRRHQNGRF-Z (SEQ ID NO: 1463), X-DANPL[Nle]A-C(Sx)-GT*LTRRHQNGRF-Z (SEQ ID NO: 1464), X-DANPLAA-C(Sx)-GT*LTRRHQNGRF-Z (SEQ ID NO: 1465), X-DANPLDA-C(Sx)-GT*LTRRHQNGRF-Z (SEQ ID NO: 1466), X-DANPLEA-C(Sx)-GT*LTRRHQNGRF-Z (SEQ ID NO: 1467), X-DANPLFA-C(Sx)-GT*LTRRHQNGRF-Z (SEQ ID NO: 1468), X-DANPLGA-C(Sx)-GT*LTRRHQNGRF-Z (SEQ ID NO: 1469), X-DANPLHA-C(Sx)-GT*LTRRHQNGRF-Z (SEQ ID NO: 1470), X-DANPLIA-C(Sx)-GT*LTRRHQNGRF-Z (SEQ ID NO: 1471), X-DANPLKA-C(Sx)-GT*LTRRHQNGRF-Z (SEQ ID NO: 1472), X-DANPLLA-C(Sx)-GT*LTRRHQNGRF-Z (SEQ ID NO: 1473), X-DANPLM[Nle]-C(Sx)-GT*LTRRHQNGRF-Z (SEQ ID NO: 1474), X-DANPLMA-C(Sx)-[Nle]T*LTRRHQNGRF-Z (SEQ ID NO: 1475), X-DANPLMA-C(Sx)-AT*LTRRHQNGRF-Z (SEQ ID NO: 1476), X-DANPLMA-C(Sx)-DT*LTRRHQNGRF-Z (SEQ ID NO: 1477), X-DANPLMA-C(Sx)-ET*LTRRHQNGRF-Z (SEQ ID NO: 1478), and X-DANPLMA-C(Sx)-FT*LTRRHQNGRF-Z (SEQ ID NO: 1479); wherein X— is H or acetyl; and Z is OH or NH2.

[0117] In some embodiments, the metal-binding compound of the present invention is selected from the group consisting of: X-DANPLMA-C(Sx)-GT*ATRRHQNGRF-Z (SEQ ID NO: 1480), X-DANPLMA-C(Sx)-GT*DTRRHQNGRF-Z (SEQ ID NO: 1481), X-DANPLMA-C(Sx)-GT*ETRRHQNGRF-Z (SEQ ID NO: 1482), X-DANPLMA-C(Sx)-GT*FTRRHQNGRF-Z (SEQ ID NO: 1483), X-DANPLMA-C(Sx)-GT*GT*RRHQNGRF-Z (SEQ ID NO: 1484), X-DANPLMA-C(Sx)-GT*HTRRHQNGRF-Z (SEQ ID NO: 1485), X-DANPLMA-C(Sx)-GT*ITRRHQNGRF-Z (SEQ ID NO: 1486), X-DANPLMA-C(Sx)-GT*KTRRHQNGRF-Z (SEQ ID NO: 1487), X-DANPLMA-C(Sx)-GT*L[Nle]RRHQNGRF-Z (SEQ ID NO: 1488), X-DANPLMA-C(Sx)-GT*LARRHQNGRF-Z (SEQ ID NO: 1202), X-DANPLMA-C(Sx)-GT*LDRRHQNGRF-Z (SEQ ID NO: 1489), X-DANPLMA-C(Sx)-GT*LERRHQNGRF-Z (SEQ ID NO: 1490), X-DANPLMA-C(Sx)-GT*LFRRHQNGRF-Z (SEQ ID NO: 1491), X-DANPLMA-C(Sx)-GT*LGRRHQNGRF-Z (SEQ ID NO: 1492), X-DANPLMA-C(Sx)-GT*LHRRHQNGRF-Z (SEQ ID NO: 1493), X-DANPLMA-C(Sx)-GT*LIRRHQNGRF-Z (SEQ ID NO: 1494), X-DANPLMA-C(Sx)-GT*LKRRHQNGRF-Z (SEQ ID NO: 1495), X-DANPLMA-C(Sx)-GT*LLRRHQNGRF-Z (SEQ ID NO: 1496), X-DANPLMA-C(Sx)-GT*LNRRHQNGRF-Z (SEQ ID NO: 1497), X-DANPLMA-C(Sx)-GT*LPRRHQNGRF-Z (SEQ ID NO: 1498), X-DANPLMA-C(Sx)-GT*LQRRHQNGRF-Z (SEQ ID NO: 1499), X-DANPLMA-C(Sx)-GT*LRRRHQNGRF-Z (SEQ ID NO: 1500), X-DANPLMA-C(Sx)-GT*LT[Nle]RHQNGRF-Z (SEQ ID NO: 1501), X-DANPLMA-C(Sx)-GT*LTARHQNGRF-Z (SEQ ID NO: 1502), X-DANPLMA-C(Sx)-GT*LTDRHQNGRF-Z (SEQ ID NO: 1503), X-DANPLMA-C(Sx)-GT*LTERHQNGRF-Z (SEQ ID NO: 1504), X-DANPLMA-C(Sx)-GT*LTFRHQNGRF-Z (SEQ ID NO: 1505), X-DANPLMA-C(Sx)-GT*LTGRHQNGRF-Z (SEQ ID NO: 1506), X-DANPLMA-C(Sx)-GT*LTHRHQNGRF-Z (SEQ ID NO: 1507), X-DANPLMA-C(Sx)-GT*LTIRHQNGRF-Z (SEQ ID NO: 1508), X-DANPLMA-C(Sx)-GT*LTKRHQNGRF-Z (SEQ ID NO: 1509), X-DANPLMA-C(Sx)-GT*LTLRHQNGRF-Z (SEQ ID NO: 1510), X-DANPLMA-C(Sx)-GT*LTNRHQNGRF-Z (SEQ ID NO: 1511), X-DANPLMA-C(Sx)-GT*LTPRHQNGRF-Z (SEQ ID NO: 1512), X-DANPLMA-C(Sx)-GT*LTQRHQNGRF-Z (SEQ ID NO: 1513), X-DANPLMA-C(Sx)-GT*LTR[Nle]HQNGRF-Z (SEQ ID NO: 1514), X-DANPLMA-C(Sx)-GT*LTRAHQNGRF-Z (SEQ ID NO: 1515), X-DANPLMA-C(Sx)-GT*LTRDHQNGRF-Z (SEQ ID NO: 1516), X-DANPLMA-C(Sx)-GT*LTREHQNGRF-Z (SEQ ID NO: 1517), X-DANPLMA-C(Sx)-GT*LTRFHQNGRF-Z (SEQ ID NO: 1518), X-DANPLMA-C(Sx)-GT*LTRGHQNGRF-Z (SEQ ID NO: 1519), X-DANPLMA-C(Sx)-GT*LTRHHQNGRF-Z (SEQ ID NO: 1520), X-DANPLMA-C(Sx)-GT*LTRIHQNGRF-Z (SEQ ID NO: 1521), X-DANPLMA-C(Sx)-GT*LTRKHQNGRF-Z (SEQ ID NO: 1522), X-DANPLMA-C(Sx)-GT*LTRLHQNGRF-Z (SEQ ID NO: 1523), X-DANPLMA-C(Sx)-GT*LTRNHQNGRF-Z (SEQ ID NO: 1524), X-DANPLMA-C(Sx)-GT*LTRPHQNGRF-Z (SEQ ID NO: 1525), X-DANPLMA-C(Sx)-GT*LTRQHQNGRF-Z (SEQ ID NO: 1526), X-DANPLMA-C(Sx)-GT*LTRR[Nle]QNGRF-Z (SEQ ID NO: 1527), X-DANPLMA-C(Sx)-GT*LTRRAQNGRF-Z (SEQ ID NO: 1528), X-DANPLMA-C(Sx)-GT*LTRRDQNGRF-Z (SEQ ID NO: 1529), X-DANPLMA-C(Sx)-GT*LTRREQNGRF-Z (SEQ ID NO: 1530), X-DANPLMA-C(Sx)-GT*LTRRFQNGRF-Z (SEQ ID NO: 1531), X-DANPLMA-C(Sx)-GT*LTRRGQNGRF-Z (SEQ ID NO: 1532), and X-DANPLMA-C(Sx)-GT*LTRRH[Nle]NGRF-Z (SEQ ID NO: 1533); wherein X is H or acetyl; and Z is OH or NH2.

[0118] In some embodiments, the metal-binding compound of the present invention is selected from the group consisting of: X-DANPLMA-C(Sx)-GT*LTRRHANGRF-Z (SEQ ID NO: 1534), X-DANPLMA-C(Sx)-GT*LTRRHDNGRF-Z (SEQ ID NO: 1535), X-DANPLMA-C(Sx)-GT*LTRRHENGRF-Z (SEQ ID NO: 1536), X-DANPLMA-C(Sx)-GT*LTRRHFNGRF-Z (SEQ ID NO: 1537), X-DANPLMA-C(Sx)-GT*LTRRHGNGRF-Z (SEQ ID NO: 1538), X-DANPLMA-C(Sx)-GT*LTRRHHNGRF-Z (SEQ ID NO: 1539), X-DANPLMA-C(Sx)-GT*LTRRHINGRF-Z (SEQ ID NO: 1540), X-DANPLMA-C(Sx)-GT*LTRRHKNGRF-Z (SEQ ID NO: 1541), X-DANPLMA-C(Sx)-GT*LTRRHLNGRF-Z (SEQ ID NO: 1542), X-DANPLMA-C(Sx)-GT*LTRRHNNGRF-Z (SEQ ID NO: 1543), X-DANPLMA-C(Sx)-GT*LTRRHPNGRF-Z (SEQ ID NO: 1544), X-DANPLMA-C(Sx)-GT*LTRRHQ[Nle]GRF-Z (SEQ ID NO: 1545), X-DANPLMA-C(Sx)-GT*LTRRHQAGRF-Z (SEQ ID NO: 1546), X-DANPLMA-C(Sx)-GT*LTRRHQDGRF-Z (SEQ ID NO: 1547), X-DANPLMA-C(Sx)-GT*LTRRHQEGRF-Z (SEQ ID NO: 1548), X-DANPLMA-C(Sx)-GT*LTRRHQFGRF-Z (SEQ ID NO: 1549), X-DANPLMA-C(Sx)-GT*LTRRHQGGRF-Z (SEQ ID NO: 1550), X-DANPLMA-C(Sx)-GT*LTRRHQHGRF-Z (SEQ ID NO: 1551), X-DANPLMA-C(Sx)-GT*LTRRHQIGRF-Z (SEQ ID NO: 1552), X-DANPLMA-C(Sx)-GT*LTRRHQKGRF-Z (SEQ ID NO: 1553), X-DANPLMA-C(Sx)-GT*LTRRHQLGRF-Z (SEQ ID NO: 1554), X-DANPLMA-C(Sx)-GT*LTRRHQN[Nle]RF-Z (SEQ ID NO: 1555), X-DANPLMA-C(Sx)-GT*LTRRHQNARF-Z (SEQ ID NO: 1556), X-DANPLMA-C(Sx)-GT*LTRRHQNDRF-Z (SEQ ID NO: 1557), X-DANPLMA-C(Sx)-GT*LTRRHQNERF-Z (SEQ ID NO: 1558), X-DANPLMA-C(Sx)-GT*LTRRHQNFRF-Z (SEQ ID NO: 1559), X-DANPLMA-C(Sx)-GT*LTRRHQNG[Nle]F-Z (SEQ ID NO: 1560), X-DANPLMA-C(Sx)-GT*LTRRHQNGAF-Z (SEQ ID NO: 1561), X-DANPLMA-C(Sx)-GT*LTRRHQNGDF-Z (SEQ ID NO: 1562), X-DANPLMA-C(Sx)-GT*LTRRHQNGEF-Z (SEQ ID NO: 1563), X-DANPLMA-C(Sx)-GT*LTRRHQNGFF-Z (SEQ ID NO: 1564), X-DANPLMA-C(Sx)-GT*LTRRHQNGGF-Z (SEQ ID NO: 1565), X-DANPLMA-C(Sx)-GT*LTRRHQNGHF-Z (SEQ ID NO: 1566), X-DANPLMA-C(Sx)-GT*LTRRHQNGIF-Z (SEQ ID NO: 1567), X-DANPLMA-C(Sx)-GT*LTRRHQNGKF-Z (SEQ ID NO: 1568), X-DANPLMA-C(Sx)-GT*LTRRHQNGLF-Z (SEQ ID NO: 1569), X-DANPLMA-C(Sx)-GT*LTRRHQNGNF-Z (SEQ ID NO: 1570), X-DANPLMA-C(Sx)-GT*LTRRHQNGPF-Z (SEQ ID NO: 1571), X-DANPLMA-C(Sx)-GT*LTRRHQNGQF-Z (SEQ ID NO: 1572), X-DANPLMA-C(Sx)-GT*LTRRHQNGR[Nle]-Z (SEQ ID NO: 1573), X-DANPLMA-C(Sx)-GT*LTRRHQNGRA-Z (SEQ ID NO: 1574), X-DANPLMA-C(Sx)-GT*LTRRHQNGRD-Z (SEQ ID NO: 1575), X-DANPLMA-C(Sx)-GT*LTRRHQNGRE-Z (SEQ ID NO: 1576), X-DANPLMA-C(Sx)-GT*LTRRHQNGRF-Z (SEQ ID NO: 1200), X-DANPLMA-C(Sx)-GT*LTRRHQNGRG-Z (SEQ ID NO: 1577), X-DANPLMA-C(Sx)-GT*LTRRHQNGRH-Z (SEQ ID NO: 1578), X-DANPLMA-C(Sx)-GT*LTRRHQNGRI-Z (SEQ ID NO: 1579), X-DANPLMA-C(Sx)-GT*LTRRHQNGRK-Z (SEQ ID NO: 1580), X-DANPLMA-C(Sx)-GT*LTRRHQNGRL-Z (SEQ ID NO: 1581), X-DANPLMA-C(Sx)-GT*LTRRHQNGRN-Z (SEQ ID NO: 1582), and X-DANPLMA-C(Sx)-GT*LTRRHQNGRP-Z (SEQ ID NO: 1583); wherein X is H or acetyl; and Z is OH or NH2.

[0119] In some embodiments, the metal-binding compound of the present invention is selected from the group consisting of: X-DANPLMA-C(Sx)-GT*LTRRHQNGRQ-Z (SEQ ID NO: 1584), X-DANPLMA-C(Sx)-GT*LTRRHQNGRR-Z (SEQ ID NO: 1585), X-DANPLMA-C(Sx)-GT*LTRRHQNGRV-Z (SEQ ID NO: 1586), X-DANPLMA-C(Sx)-GT*LTRRHQNGRW-Z (SEQ ID NO: 1587), X-DANPLMA-C(Sx)-GT*LTRRHQNGVF-Z (SEQ ID NO: 1588), X-DANPLMA-C(Sx)-GT*LTRRHQNGWF-Z (SEQ ID NO: 1589), X-DANPLMA-C(Sx)-GT*LTRRHQNHRF-Z (SEQ ID NO: 1590), X-DANPLMA-C(Sx)-GT*LTRRHQNIRF-Z (SEQ ID NO: 1591), X-DANPLMA-C(Sx)-GT*LTRRHQNKRF-Z (SEQ ID NO: 1592), X-DANPLMA-C(Sx)-GT*LTRRHQNLRF-Z (SEQ ID NO: 1593), X-DANPLMA-C(Sx)-GT*LTRRHQNNRF-Z (SEQ ID NO: 1594), X-DANPLMA-C(Sx)-GT*LTRRHQNPRF-Z (SEQ ID NO: 1595), X-DANPLMA-C(Sx)-GT*LTRRHQNQRF-Z (SEQ ID NO: 1596), X-DANPLMA-C(Sx)-GT*LTRRHQNRRF-Z (SEQ ID NO: 1597), X-DANPLMA-C(Sx)-GT*LTRRHQNVRF-Z (SEQ ID NO: 1598), X-DANPLMA-C(Sx)-GT*LTRRHQNWRF-Z (SEQ ID NO: 1599), X-DANPLMA-C(Sx)-GT*LTRRHQPGRF-Z (SEQ ID NO: 1600), X-DANPLMA-C(Sx)-GT*LTRRHQQGRF-Z (SEQ ID NO: 1601), X-DANPLMA-C(Sx)-GT*LTRRHQRGRF-Z (SEQ ID NO: 1602), X-DANPLMA-C(Sx)-GT*LTRRHQVGRF-Z (SEQ ID NO: 1603), X-DANPLMA-C(Sx)-GT*LTRRHQWGRF-Z (SEQ ID NO: 1604), X-DANPLMA-C(Sx)-GT*LTRRHRNGRF-Z (SEQ ID NO: 1605), X-DANPLMA-C(Sx)-GT*LTRRHVNGRF-Z (SEQ ID NO: 1606), X-DANPLMA-C(Sx)-GT*LTRRHWNGRF-Z (SEQ ID NO: 1607), X-DANPLMA-C(Sx)-GT*LTRRIQNGRF-Z (SEQ ID NO: 1608), X-DANPLMA-C(Sx)-GT*LTRRKQNGRF-Z (SEQ ID NO: 1609), X-DANPLMA-C(Sx)-GT*LTRRLQNGRF-Z (SEQ ID NO: 1610), X-DANPLMA-C(Sx)-GT*LTRRNQNGRF-Z (SEQ ID NO: 1611), X-DANPLMA-C(Sx)-GT*LTRRPQNGRF-Z (SEQ ID NO: 1612), X-DANPLMA-C(Sx)-GT*LTRRQQNGRF-Z (SEQ ID NO: 1613), X-DANPLMA-C(Sx)-GT*LTRRRQNGRF-Z (SEQ ID NO: 1614), X-DANPLMA-C(Sx)-GT*LTRRVQNGRF-Z (SEQ ID NO: 1615), X-DANPLMA-C(Sx)-GT*LTRRWQNGRF-Z (SEQ ID NO: 1616), X-DANPLMA-C(Sx)-GT*LTRVHQNGRF-Z (SEQ ID NO: 1617), X-DANPLMA-C(Sx)-GT*LTRWHQNGRF-Z (SEQ ID NO: 1618), X-DANPLMA-C(Sx)-GT*LTVRHQNGRF-Z (SEQ ID NO: 1619), X-DANPLMA-C(Sx)-GT*LTWRHQNGRF-Z (SEQ ID NO: 1620), X-DANPLMA-C(Sx)-GT*LVRRHQNGRF-Z (SEQ ID NO: 1621), X-DANPLMA-C(Sx)-GT*LWRRHQNGRF-Z (SEQ ID NO: 1622), X-DANPLMA-C(Sx)-GT*NTRRHQNGRF-Z (SEQ ID NO: 1623), X-DANPLMA-C(Sx)-GT*PTRRHQNGRF-Z (SEQ ID NO: 1624), X-DANPLMA-C(Sx)-GT*QTRRHQNGRF-Z (SEQ ID NO: 1625), X-DANPLMA-C(Sx)-GT*RTRRHQNGRF-Z (SEQ ID NO: 1626), X-DANPLMA-C(Sx)-GT*VTRRHQNGRF-Z (SEQ ID NO: 1627), X-DANPLMA-C(Sx)-GT*WTRRHQNGRF-Z (SEQ ID NO: 1628), X-DANPLMA-C(Sx)-GT[Nle]TRRHQNGRF-Z (SEQ ID NO: 1629), X-DANPLMA-C(Sx)-HT*LTRRHQNGRF-Z (SEQ ID NO: 1630), and X-DANPLMA-C(Sx)-IT*LTRRHQNGRF-Z (SEQ ID NO: 1631); wherein X is H or acetyl; and Z is OH or NH2.

[0120] In some embodiments, the metal-binding compound of the present invention is selected from the group consisting of: X-DANPLMA-C(Sx)-KT*LTRRHQNGRF-Z (SEQ ID NO: 1632), X-DANPLMA-C(Sx)-LT*LTRRHQNGRF-Z (SEQ ID NO: 1633), X-DANPLMA-C(Sx)-NT*LTRRHQNGRF-Z (SEQ ID NO: 1634), X-DANPLMA-C(Sx)-PT*LTRRHQNGRF-Z (SEQ ID NO: 1635), X-DANPLMA-C(Sx)-QT*LTRRHQNGRF-Z (SEQ ID NO: 1636), X-DANPLMA-C(Sx)-RT*LTRRHQNGRF-Z (SEQ ID NO: 1637), X-DANPLMA-C(Sx)-VT*LTRRHQNGRF-Z (SEQ ID NO: 1638), X-DANPLMA-C(Sx)-WT*LTRRHQNGRF-Z (SEQ ID NO: 1639), X-DANPLMANGT*L-C(Sx)-RRHQNGRF-Z (SEQ ID NO: 1199), X-DANPLM-C(Sx)-NGT*LARRHQNGRF-Z (SEQ ID NO: 1203), X-DANPLM-C(Sx)-NGT*LTRRHQNGRF-Z (SEQ ID NO: 1201), X-DANPLMD-C(Sx)-GT*LTRRHQNGRF-Z (SEQ ID NO: 1640), X-DANPLME-C(Sx)-GT*LTRRHQNGRF-Z (SEQ ID NO: 1641), X-DANPLMF-C(Sx)-GT*LTRRHQNGRF-Z (SEQ ID NO: 1642), X-DANPLMG-C(Sx)-GT*LTRRHQNGRF-Z (SEQ ID NO: 1643), X-DANPLMH-C(Sx)-GT*LTRRHQNGRF-Z (SEQ ID NO: 1644), X-DANPLMI-C(Sx)-GT*LTRRHQNGRF-Z (SEQ ID NO: 1645), X-DANPLMK-C(Sx)-GT*LTRRHQNGRF-Z (SEQ ID NO: 1646), X-DANPLML-C(Sx)-GT*LTRRHQNGRF-Z (SEQ ID NO: 1647), X-DANPLMN-C(Sx)-GT*LTRRHQNGRF-Z (SEQ ID NO: 1648), X-DANPLMP-C(Sx)-GT*LTRRHQNGRF-Z (SEQ ID NO: 1649), X-DANPLMQ-C(Sx)-GT*LTRRHQNGRF-Z (SEQ ID NO: 1650), X-DANPLMR-C(Sx)-GT*LTRRHQNGRF-Z (SEQ ID NO: 1651), X-DANPLMV-C(Sx)-GT*LTRRHQNGRF-Z (SEQ ID NO: 1652), X-DANPLMW-C(Sx)-GT*LTRRHQNGRF-Z (SEQ ID NO: 1653), X-DANPLNA-C(Sx)-GT*LTRRHQNGRF-Z (SEQ ID NO: 1654), X-DANPLPA-C(Sx)-GT*LTRRHQNGRF-Z (SEQ ID NO: 1655), X-DANPLQA-C(Sx)-GT*LTRRHQNGRF-Z (SEQ ID NO: 1656), X-DANPLRA-C(Sx)-GT*LTRRHQNGRF-Z (SEQ ID NO: 1657), X-DANPLVA-C(Sx)-GT*LTRRHQNGRF-Z (SEQ ID NO: 1658), X-DANPLWA-C(Sx)-GT*LTRRHQNGRF-Z (SEQ ID NO: 1659), X-DANPNMA-C(Sx)-GT*LTRRHQNGRF-Z (SEQ ID NO: 1660), X-DANPPMA-C(Sx)-GT*LTRRHQNGRF-Z (SEQ ID NO: 1661), X-DANPQMA-C(Sx)-GT*LTRRHQNGRF-Z (SEQ ID NO: 1662), X-DANPRMA-C(Sx)-GT*LTRRHQNGRF-Z (SEQ ID NO: 1663), X-DANPVMA-C(Sx)-GT*LTRRHQNGRF-Z (SEQ ID NO: 1664), X-DANPWMA-C(Sx)-GT*LTRRHQNGRF-Z (SEQ ID NO: 1665), X-DANQLMA-C(Sx)-GT*LTRRHQNGRF-Z (SEQ ID NO: 1666), X-DANRLMA-C(Sx)-GT*LTRRHQNGRF-Z (SEQ ID NO: 1667), X-DANVLMA-C(Sx)-GT*LTRRHQNGRF-Z (SEQ ID NO: 1668), X-DANWLMA-C(Sx)-GT*LTRRHQNGRF-Z (SEQ ID NO: 1669), X-DAPPLMA-C(Sx)-GT*LTRRHQNGRF-Z (SEQ ID NO: 1670), X-DAQPLMA-C(Sx)-GT*LTRRHQNGRF-Z (SEQ ID NO: 1671), X-DARPLMA-C(Sx)-GT*LTRRHQNGRF-Z (SEQ ID NO: 1672), X-DAVPLMA-C(Sx)-GT*LTRRHQNGRF-Z (SEQ ID NO: 1673), X-DAWPLMA-C(Sx)-GT*LTRRHQNGRF-Z (SEQ ID NO: 1674), X-D-C(Sx)-DS*LRRKAK-Z (SEQ ID NO: 1675), X-D-C(Sx)-LS*PGPF-Z (SEQ ID NO: 1676), X-DDIEQWFTE-C(Sx)-PGPDE-Z (SEQ ID NO: 1677), X-DDNPLMA-C(Sx)-GT*LTRRHQNGRF-Z (SEQ ID NO: 1678), X-DE-C(Sx)-EGT*FRAAIRRLAARRR-Z (SEQ ID NO: 665), X-DE-C(Sx)-EGT*FRSSIRRLSSRRR-Z (SEQ ID NO: 662), and X-DENPLMA-C(Sx)-GT*LTRRHQNGRF-Z (SEQ ID NO: 1679); wherein X— is H or acetyl; and Z is OH or NH2.

[0121] In some embodiments, the metal-binding compound of the present invention is selected from the group consisting of: X-DFGLSKWR[Nle][Nle]S*L-C(Sx)-QSRSSKS-Z (SEQ ID NO: 1680), X-DFGLSKWR[Nle][Nle]SL-C(Sx)-QS*RSSKS-Z (SEQ ID NO: 1681), X-DFGLSKWRMMS*L-C(Sx)-QSRSSKS-Z (SEQ ID NO: 1682), X-DFGLSKWRMMS*L-C(Sx)-QSR-Z (SEQ ID NO: 1683), X-DFGLSKWRMMS*L-C(Sx)-Q-Z (SEQ ID NO: 1684), X-DFGLSKWRMMSL-C(Sx)-QS*RSSKS-Z (SEQ ID NO: 1685), X-DFGLSKWRMMSL-C(Sx)-QS*R-Z (SEQ ID NO: 1686), X-DFNPLMA-C(Sx)-GT*LTRRHQNGRF-Z (SEQ ID NO: 1687), X-DGNPLMA-C(Sx)-GT*LTRRHQNGRF-Z (SEQ ID NO: 1688), X-DHNPLMA-C(Sx)-GT*LTRRHQNGRF-Z (SEQ ID NO: 1689), X-DINPLMA-C(Sx)-GT*LTRRHQNGRF-Z (SEQ ID NO: 1690), X-DKNPLMA-C(Sx)-GT*LTRRHQNGRF-Z (SEQ ID NO: 1691), X-DKRPQRAT*S-C(Sx)-VFAMF-Z (SEQ ID NO: 1692), X-DLGYAKDV-C(Sx)-QGS*LCTSFVGTLQYLAPEKKK-Z (SEQ ID NO: 1013), X-DLGYAKDVDQGS*L-C(Sx)-TSFVGTLQYLAPE-Z (SEQ ID NO: 1014), X-DLGYAKDVDQGSL-C(Sx)-TS*FVGTLQYLAPE-Z (SEQ ID NO: 1015), X-DLGYAKDVDQGSLCTS*F-C(Sx)-GTLQYLAPE-Z (SEQ ID NO: 1016), X-DLGYAKDVDQGSLCTSF-C(Sx)-GT*LQYLAPE-Z (SEQ ID NO: 1693), X-DLI[Nle]KEDYE-C(Sx)-VS*TKPTR-Z (SEQ ID NO: 1694), X-DLIMKEDYE-C(Sx)-VS*TKPTR-Z (SEQ ID NO: 1695), X-DLLR-C(Sx)-SS*RRIRR-Z (SEQ ID NO: 1696), X-DLNPLMA-C(Sx)-GT*LTRRHQNGRF-Z (SEQ ID NO: 1697), X-DLPDM-C(Sx)-ET*KYTVDKRFGM-Z (SEQ ID NO: 1698), X-DLPDMKET*K-C(Sx)-TVDKRFGM-Z (SEQ ID NO: 1699), X-DLPDMKET-C(Sx)-YT*VDKRFGM-Z (SEQ ID NO: 1700), X-DLPDMKETKYT*V-C(Sx)-KRFGM-Z (SEQ ID NO: 1701), X-DLPWWR-C(Sx)-YT*WVVERDVNTKQR-Z (SEQ ID NO: 1702), X-DNNPLMA-C(Sx)-GT*LTRRHQNGRF-Z (SEQ ID NO: 1703), X-DPLPP-C(Sx)-FS*GTPKGSGKKK-Z (SEQ ID NO: 1704), X-DPNPLMA-C(Sx)-GT*LTRRHQNGRF-Z (SEQ ID NO: 1705), X-DPQLPSRT*P-C(Sx)-QGPRP-Z (SEQ ID NO: 1188), X-DPRGD-C(Sx)-HS*PIVLGRP-Z (SEQ ID NO: 1144), X-DPRGDFHS*P-C(Sx)-VLGRP-Z (SEQ ID NO: 1143), X-DQNPLMA-C(Sx)-GT*LTRRHQNGRF-Z (SEQ ID NO: 1706), X-DQREGFGRQS*M-C(Sx)-EKR-Z (SEQ ID NO: 1707), X-DRNPLMA-C(Sx)-GT*LTRRHQNGRF-Z (SEQ ID NO: 1708), X-DRR-C(Sx)-AS*FRRR-Z (SEQ ID NO: 1709), X-DRVS*R-C(Sx)-SSPLKTGEQ-Z (SEQ ID NO: 1710), X-DRVSR-C(Sx)-SS*PLKTGEQ-Z (SEQ ID NO: 1711), X-DSLSYYHS*P-C(Sx)-DSFSS-Z (SEQ ID NO: 1174), X-DSLSYYHSP-C(Sx)-DS*FSS-Z (SEQ ID NO: 1712), X-DVNPLMA-C(Sx)-GT*LTRRHQNGRF-Z (SEQ ID NO: 1713), and X-DWNPLMA-C(Sx)-GT*LTRRHQNGRF-Z (SEQ ID NO: 1714); wherein X is H or acetyl; and Z is OH or NH2.

[0122] In some embodiments, the metal-binding compound of the present invention is selected from the group consisting of: X-EAKTTKKRPQRATS*N-C(Sx)-FS-Z (SEQ ID NO: 1715), X-EAKTTKKRPQRATSN-C(Sx)-FS*-Z (SEQ ID NO: 1716), X-EANPLMA-C(Sx)-GT*LTRRHQNGRF-Z (SEQ ID NO: 1717), X-E-C(Sx)-DS*LRRKAK-Z (SEQ ID NO: 1718), X-E-C(Sx)-LS*PGPF-Z (SEQ ID NO: 1719), X-EDFSS*I-C(Sx)-DMDFSALLSQISS-Z (SEQ ID NO: 1720), X-EDPDYE-C(Sx)-PS*A-Z (SEQ ID NO: 1721), X-EENV-C(Sx)-DGS*PNAGSVE-Z (SEQ ID NO: 1039), X-EENVSDGS*P-C(Sx)-AGSVE-Z (SEQ ID NO: 1038), X-EEYET-C(Sx)-ES*PVPPARS-Z (SEQ ID NO: 1047), X-EEYETPES*P-C(Sx)-PPARS-Z (SEQ ID NO: 1046), X-EGMI-C(Sx)-LS*ESSRRRIRSGNKL-Z (SEQ ID NO: 1722), X-EGMILLS*E-C(Sx)-SRRRIRSGNKL-Z (SEQ ID NO: 1723), X-EIRSRHSS*Y-C(Sx)-AGTED-Z (SEQ ID NO: 1103), X-EKGPEGVS*P-C(Sx)-QAHLH-Z (SEQ ID NO: 1185), X-EKRPQRAT*S-C(Sx)-VFAMF-Z (SEQ ID NO: 1724), X-ELLR-C(Sx)-SS*RRIRR-Z (SEQ ID NO: 1725), X-ELPWWR-C(Sx)-YT*WVVERDVNTKQR-Z (SEQ ID NO: 1726), X-ELRKT-C(Sx)-TS*[Nle]SLGTTREKTD-Z (SEQ ID NO: 1727), X-ELRKTQTS[Nle]S*L-C(Sx)-TTREKTD-Z (SEQ ID NO: 1728), X-ELRKTQTS[Nle]SL-C(Sx)-TT*REKTD-Z (SEQ ID NO: 1729), X-EPAA-C(Sx)-IS*PLGALQHGFFR-Z (SEQ ID NO: 1730), X-EPAARIS*P-C(Sx)-GALQHGFFR-Z (SEQ ID NO: 1731), X-EP-C(Sx)-LS*QEAFADLWKK-Z (SEQ ID NO: 1732), X-EP-C(Sx)-LS*QETFSDLWKK-Z (SEQ ID NO: 1733), X-EP-C(Sx)-QS*QEAFADLWKK-Z (SEQ ID NO: 1734), X-EP-C(Sx)-QS*QETFSDLWK-Z (SEQ ID NO: 1735), X-EPGPVPSS*P-C(Sx)-QEPPT-Z (SEQ ID NO: 1166), X-EPIQEANYV-C(Sx)-MT*PGT-Z (SEQ ID NO: 1736), X-EPPPR-C(Sx)-KT*PEIFRAL-Z (SEQ ID NO: 1737), X-EPPPRPKT*P-C(Sx)-IFRAL-Z (SEQ ID NO: 1100), X-EQREGFGRQS*M-C(Sx)-EKR-Z (SEQ ID NO: 1738), X-ERR-C(Sx)-AS*FRRR-Z (SEQ ID NO: 1739), and X-ESPEKVS*P-C(Sx)-KISDF-Z (SEQ ID NO: 1740); wherein X— is H or acetyl; and Z is OH or NH2.

[0123] In some embodiments, the metal-binding compound of the present invention is selected from the group consisting of: X-ET-C(Sx)-ST*QELYSIPEDQE-Z (SEQ ID NO: 1741), X-EVPDVTAT*P-C(Sx)-RLLFF-Z (SEQ ID NO: 1080), X-EYSLPALT*P-C(Sx)-LDEVK-Z (SEQ ID NO: 1123), X-EYSLPALT*PG-C(Sx)-DEVK-Z (SEQ ID NO: 1742), X-EYSLP-C(Sx)-LT*PGLDEVK-Z (SEQ ID NO: 1743), X-F[Nle]REGFGRQS*M-C(Sx)-EKR-Z (SEQ ID NO: 1744), X-FAKTTKKRPQRATS*N-C(Sx)-FS-Z (SEQ ID NO: 1745), X-FAKTTKKRPQRATSN-C(Sx)-FS*-Z (SEQ ID NO: 1746), X-FANPLMA-C(Sx)-GT*LTRRHQNGRF-Z (SEQ ID NO: 1747), X-FAREGFGRQS*M-C(Sx)-EKR-Z (SEQ ID NO: 1748), X-F-C(Sx)-DS*LRRKAK-Z (SEQ ID NO: 1749), X-F-C(Sx)-LS*PGPF-Z (SEQ ID NO: 1750), X-FDREGFGRQS*M-C(Sx)-EKR-Z (SEQ ID NO: 1751), X-FEREGFGRQS*M-C(Sx)-EKR-Z (SEQ ID NO: 1752), X-FFKK-C(Sx)-VT*PRTP-Z (SEQ ID NO: 1753), X-FFKKIVT*P-C(Sx)-TP-Z (SEQ ID NO: 1754), X-FFKNIVT-C(Sx)-RT*PPPSQGK-Z (SEQ ID NO: 1755), X-FFREGFGRQS*M-C(Sx)-EKR-Z (SEQ ID NO: 1756), X-FGESPPLS*P-C(Sx)-DMDTQ-Z (SEQ ID NO: 1079), X-FGREGFGRQS*M-C(Sx)-EKR-Z (SEQ ID NO: 1757), X-FHREGFGRQS*M-C(Sx)-EKR-Z (SEQ ID NO: 1758), X-FIREGFGRQS*M-C(Sx)-EKR-Z (SEQ ID NO: 1759), X-FKREGFGRQS*M-C(Sx)-EKR-Z (SEQ ID NO: 1760), X-FKRPQRAT*S-C(Sx)-VFAMF-Z (SEQ ID NO: 1761), X-FKTEG-C(Sx)-DS*D-Z (SEQ ID NO: 1762), X-FKTEGPDS*D-C(Sx)-Z (SEQ ID NO: 1763), X-FLLR-C(Sx)-SS*RRIRR-Z (SEQ ID NO: 1764), X-FLPWWR-C(Sx)-YT*WVVERDVNTKQR-Z (SEQ ID NO: 1765), X-FLREGFGRQS*M-C(Sx)-EKR-Z (SEQ ID NO: 1766), X-FNREGFGRQS*M-C(Sx)-EKR-Z (SEQ ID NO: 1767), X-FP-C(Sx)-FS*YSASGTA-Z (SEQ ID NO: 1768), X-FPREGFGRQS*M-C(Sx)-EKR-Z (SEQ ID NO: 1769), X-FPRGSSSRST*F-C(Sx)-GEGLR-Z (SEQ ID NO: 1770), X-FQ[Nle]EGFGRQS*M-C(Sx)-EKR-Z (SEQ ID NO: 1771), X-FQAEGFGRQS*M-C(Sx)-EKR-Z (SEQ ID NO: 1772), X-FQDEGFGRQS*M-C(Sx)-EKR-Z (SEQ ID NO: 1773), X-FQEEGFGRQS*M-C(Sx)-EKR-Z (SEQ ID NO: 1774), X-FQFEGFGRQS*M-C(Sx)-EKR-Z (SEQ ID NO: 1775), X-FQGEGFGRQS*M-C(Sx)-EKR-Z (SEQ ID NO: 1776), X-FQHEGFGRQS*M-C(Sx)-EKR-Z (SEQ ID NO: 1777), X-FQIEGFGRQS*M-C(Sx)-EKR-Z (SEQ ID NO: 1778), X-FQKEGFGRQS*M-C(Sx)-EKR-Z (SEQ ID NO: 1779), X-FQLEGFGRQS*M-C(Sx)-EKR-Z (SEQ ID NO: 1780), X-FQNEGFGRQS*M-C(Sx)-EKR-Z (SEQ ID NO: 1781), X-FQPEGFGRQS*M-C(Sx)-EKR-Z (SEQ ID NO: 1782), X-FQQEGFGRQS*M-C(Sx)-EKR-Z (SEQ ID NO: 1783), X-FQR[Nle]GFGRQS*M-C(Sx)-EKR-Z (SEQ ID NO: 1784), X-FQRAGFGRQS*M-C(Sx)-EKR-Z (SEQ ID NO: 1785), X-FQRDGFGRQS*M-C(Sx)-EKR-Z (SEQ ID NO: 1786), X-FQRE[Nle]FGRQS*M-C(Sx)-EKR-Z (SEQ ID NO: 1787), X-FQREAFGRQS*M-C(Sx)-EKR-Z (SEQ ID NO: 1788), X-FQREDFGRQS*M-C(Sx)-EKR-Z (SEQ ID NO: 1789), X-FQREEFGRQS*M-C(Sx)-EKR-Z (SEQ ID NO: 1790), X-FQREFFGRQS*M-C(Sx)-EKR-Z (SEQ ID NO: 1791), X-FQREG[Nle]GRQS*M-C(Sx)-EKR-Z (SEQ ID NO: 1792), X-FQREGAGRQS*M-C(Sx)-EKR-Z (SEQ ID NO: 1793), X-FQREGDGRQS*M-C(Sx)-EKR-Z (SEQ ID NO: 1794), X-FQREGEGRQS*M-C(Sx)-EKR-Z (SEQ ID NO: 1795), X-FQREGF[Nle]RQS*M-C(Sx)-EKR-Z (SEQ ID NO: 1796), X-FQREGFARQS*M-C(Sx)-EKR-Z (SEQ ID NO: 1797), and X-FQREGFDRQS*M-C(Sx)-EKR-Z (SEQ ID NO: 1798); wherein X is H or acetyl; and Z is OH or NH2.

[0124] In some embodiments, the metal-binding compound of the present invention is selected from the group consisting of: X-FQREGFERQS*M-C(Sx)-EKR-Z (SEQ ID NO: 1799), X-FQREGFFRQS*M-C(Sx)-EKR-Z (SEQ ID NO: 1800), X-FQREGFG[Nle]QS*M-C(Sx)-EKR-Z (SEQ ID NO: 1801), X-FQREGFGAQS*M-C(Sx)-EKR-Z (SEQ ID NO: 1802), X-FQREGFGDQS*M-C(Sx)-EKR-Z (SEQ ID NO: 1803), X-FQREGFGEQS*M-C(Sx)-EKR-Z (SEQ ID NO: 1804), X-FQREGFGFQS*M-C(Sx)-EKR-Z (SEQ ID NO: 1805), X-FQREGFGGQS*M-C(Sx)-EKR-Z (SEQ ID NO: 1806), X-FQREGFGHQS*M-C(Sx)-EKR-Z (SEQ ID NO: 1807), X-FQREGFGIQS*M-C(Sx)-EKR-Z (SEQ ID NO: 1808), X-FQREGFGKQS*M-C(Sx)-EKR-Z (SEQ ID NO: 1809), X-FQREGFGLQS*M-C(Sx)-EKR-Z (SEQ ID NO: 1810), X-FQREGFGNQS*M-C(Sx)-EKR-Z (SEQ ID NO: 1811), X-FQREGFGPQS*M-C(Sx)-EKR-Z (SEQ ID NO: 1812), X-FQREGFGQQS*M-C(Sx)-EKR-Z (SEQ ID NO: 1813), X-FQREGFGR[Nle]S*M-C(Sx)-EKR-Z (SEQ ID NO: 1814), X-FQREGFGRAS*M-C(Sx)-EKR-Z (SEQ ID NO: 1815), X-FQREGFGRDS*M-C(Sx)-EKR-Z (SEQ ID NO: 1816), X-FQREGFGRES*M-C(Sx)-EKR-Z (SEQ ID NO: 1817), X-FQREGFGRFS*M-C(Sx)-EKR-Z (SEQ ID NO: 1818), X-FQREGFGRGS*M-C(Sx)-EKR-Z (SEQ ID NO: 1819), X-FQREGFGRHS*M-C(Sx)-EKR-Z (SEQ ID NO: 1820), X-FQREGFGRIS*M-C(Sx)-EKR-Z (SEQ ID NO: 1821), X-FQREGFGRKS*M-C(Sx)-EKR-Z (SEQ ID NO: 1822), X-FQREGFGRLS*M-C(Sx)-EKR-Z (SEQ ID NO: 1823), X-FQREGFGRNS*M-C(Sx)-EKR-Z (SEQ ID NO: 1824), X-FQREGFGRPS*M-C(Sx)-EKR-Z (SEQ ID NO: 1825), X-FQREGFGRQS*[Nle]-C(Sx)-EKR-Z (SEQ ID NO: 1826), X-FQREGFGRQS*A-C(Sx)-EKR-Z (SEQ ID NO: 1827), X-FQREGFGRQS*D-C(Sx)-EKR-Z (SEQ ID NO: 1828), X-FQREGFGRQS*E-C(Sx)-EKR-Z (SEQ ID NO: 1829), X-FQREGFGRQS*F-C(Sx)-EKR-Z (SEQ ID NO: 1830), X-FQREGFGRQS*G-C(Sx)-EKR-Z (SEQ ID NO: 1831), X-FQREGFGRQS*H-C(Sx)-EKR-Z (SEQ ID NO: 1832), X-FQREGFGRQS*I-C(Sx)-EKR-Z (SEQ ID NO: 1833), X-FQREGFGRQS*K-C(Sx)-EKR-Z (SEQ ID NO: 1834), X-FQREGFGRQS*L-C(Sx)-EKR-Z (SEQ ID NO: 1835), X-FQREGFGRQS*M-C(Sx)-[Nle]KR-Z (SEQ ID NO: 1836), X-FQREGFGRQS*M-C(Sx)-AKR-Z (SEQ ID NO: 1837), X-FQREGFGRQS*M-C(Sx)-DKR-Z (SEQ ID NO: 1838), X-FQREGFGRQS*M-C(Sx)-E[Nle]R-Z (SEQ ID NO: 1839), X-FQREGFGRQS*M-C(Sx)-EAATK-Z (SEQ ID NO: 1840), X-FQREGFGRQS*M-C(Sx)-EAR-Z (SEQ ID NO: 1841), X-FQREGFGRQS*M-C(Sx)-EDR-Z (SEQ ID NO: 1842), X-FQREGFGRQS*M-C(Sx)-EER-Z (SEQ ID NO: 1843), X-FQREGFGRQS*M-C(Sx)-EFR-Z (SEQ ID NO: 1844), X-FQREGFGRQS*M-C(Sx)-EGR-Z (SEQ ID NO: 1845), X-FQREGFGRQS*M-C(Sx)-EHR-Z (SEQ ID NO: 1846), X-FQREGFGRQS*M-C(Sx)-EIR-Z (SEQ ID NO: 1847), X-FQREGFGRQS*M-C(Sx)-EK[Nle]amide-Z (SEQ ID NO: 1848), X-FQREGFGRQS*M-C(Sx)-EKA-Z (SEQ ID NO: 1849), X-FQREGFGRQS*M-C(Sx)-EKD-Z (SEQ ID NO: 1850), X-FQREGFGRQS*M-C(Sx)-EKE-Z (SEQ ID NO: 1851), X-FQREGFGRQS*M-C(Sx)-EKF-Z (SEQ ID NO: 1852), X-FQREGFGRQS*M-C(Sx)-EKG-Z (SEQ ID NO: 1853), X-FQREGFGRQS*M-C(Sx)-EKH-Z (SEQ ID NO: 1854), and X-FQREGFGRQS*M-C(Sx)-EKI-Z (SEQ ID NO: 1855); wherein X is H or acetyl; and Z is OH or NH2.

[0125] In some embodiments, the metal-binding compound of the present invention is selected from the group consisting of: X-FQREGFGRQS*M-C(Sx)-EKK-Z (SEQ ID NO: 1856), X-FQREGFGRQS*M-C(Sx)-EKL-Z (SEQ ID NO: 1857), X-FQREGFGRQS*M-C(Sx)-EKN-Z (SEQ ID NO: 1858), X-FQREGFGRQS*M-C(Sx)-EKP-Z (SEQ ID NO: 1859), X-FQREGFGRQS*M-C(Sx)-EKQ-Z (SEQ ID NO: 1860), X-FQREGFGRQS*M-C(Sx)-EKR[pT]K-Z (SEQ ID NO: 1861), X-FQREGFGRQS*M-C(Sx)-EKRTK-Z (SEQ ID NO: 1862), X-FQREGFGRQS*M-C(Sx)-EKV-Z (SEQ ID NO: 1863), X-FQREGFGRQS*M-C(Sx)-EKW-Z (SEQ ID NO: 1864), X-FQREGFGRQS*M-C(Sx)-ELR-Z (SEQ ID NO: 1865), X-FQREGFGRQS*M-C(Sx)-ENR-Z (SEQ ID NO: 1866), X-FQREGFGRQS*M-C(Sx)-EPR-Z (SEQ ID NO: 1867), X-FQREGFGRQS*M-C(Sx)-EQR-Z (SEQ ID NO: 1868), X-FQREGFGRQS*M-C(Sx)-ERR-Z (SEQ ID NO: 1869), X-FQREGFGRQS*M-C(Sx)-EVR-Z (SEQ ID NO: 1870), X-FQREGFGRQS*M-C(Sx)-EWR-Z (SEQ ID NO: 1871), X-FQREGFGRQS*M-C(Sx)-FKR-Z (SEQ ID NO: 1872), X-FQREGFGRQS*M-C(Sx)-GKR-Z (SEQ ID NO: 1873), X-FQREGFGRQS*M-C(Sx)-HKR-Z (SEQ ID NO: 1874), X-FQREGFGRQS*M-C(Sx)-IKR-Z (SEQ ID NO: 1875), X-FQREGFGRQS*M-C(Sx)-KKR-Z (SEQ ID NO: 1876), X-FQREGFGRQS*M-C(Sx)-LKR-Z (SEQ ID NO: 1877), X-FQREGFGRQS*M-C(Sx)-NKR-Z (SEQ ID NO: 1878), X-FQREGFGRQS*M-C(Sx)-PKR-Z (SEQ ID NO: 1879), X-FQREGFGRQS*M-C(Sx)-QKR-Z (SEQ ID NO: 1880), X-FQREGFGRQS*M-C(Sx)-RKR-Z (SEQ ID NO: 1881), X-FQREGFGRQS*M-C(Sx)-VKR-Z (SEQ ID NO: 1882), X-FQREGFGRQS*M-C(Sx)-WKR-Z (SEQ ID NO: 1883), X-FQREGFGRQS*N-C(Sx)-EKR-Z (SEQ ID NO: 1884), X-FQREGFGRQS*P-C(Sx)-EKR-Z (SEQ ID NO: 1885), X-FQREGFGRQS*Q-C(Sx)-EKR-Z (SEQ ID NO: 1886), X-FQREGFGRQS*R-C(Sx)-EKR-Z (SEQ ID NO: 1887), X-FQREGFGRQS*V-C(Sx)-EKR-Z (SEQ ID NO: 1888), X-FQREGFGRQS*W-C(Sx)-EKR-Z (SEQ ID NO: 1889), X-FQREGFGRRS*M-C(Sx)-EKR-Z (SEQ ID NO: 1890), X-FQREGFGRVS*M-C(Sx)-EKR-Z (SEQ ID NO: 1891), X-FQREGFGRWS*M-C(Sx)-EKR-Z (SEQ ID NO: 1892), X-FQREGFGVQS*M-C(Sx)-EKR-Z (SEQ ID NO: 1893), X-FQREGFGWQS*M-C(Sx)-EKR-Z (SEQ ID NO: 1894), X-FQREGFHRQS*M-C(Sx)-EKR-Z (SEQ ID NO: 1895), X-FQREGFIRQS*M-C(Sx)-EKR-Z (SEQ ID NO: 1896), X-FQREGFKRQS*M-C(Sx)-EKR-Z (SEQ ID NO: 1897), X-FQREGFLRQS*M-C(Sx)-EKR-Z (SEQ ID NO: 1898), X-FQREGFNRQS*M-C(Sx)-EKR-Z (SEQ ID NO: 1899), X-FQREGFPRQS*M-C(Sx)-EKR-Z (SEQ ID NO: 1900), X-FQREGFQRQS*M-C(Sx)-EKR-Z (SEQ ID NO: 1901), X-FQREGFRRQS*M-C(Sx)-EKR-Z (SEQ ID NO: 1902), X-FQREGFVRQS*M-C(Sx)-EKR-Z (SEQ ID NO: 1903), X-FQREGFWRQS*M-C(Sx)-EKR-Z (SEQ ID NO: 1904), X-FQREGGGRQS*M-C(Sx)-EKR-Z (SEQ ID NO: 1905), X-FQREGHGRQS*M-C(Sx)-EKR-Z (SEQ ID NO: 1906), X-FQREGIGRQS*M-C(Sx)-EKR-Z (SEQ ID NO: 1907), X-FQREGKGRQS*M-C(Sx)-EKR-Z (SEQ ID NO: 1908), X-FQREGLGRQS*M-C(Sx)-EKR-Z (SEQ ID NO: 1909), X-FQREGNGRQS*M-C(Sx)-EKR-Z (SEQ ID NO: 1910), X-FQREGPGRQS*M-C(Sx)-EKR-Z (SEQ ID NO: 1911), X-FQREGQGRQS*M-C(Sx)-EKR-Z (SEQ ID NO: 1912), X-FQREGRGRQS*M-C(Sx)-EKR-Z (SEQ ID NO: 1913), X-FQREGVGRQS*M-C(Sx)-EKR-Z (SEQ ID NO: 1914), X-FQREGWGRQS*M-C(Sx)-EKR-Z (SEQ ID NO: 1915), X-FQREHFGRQS*M-C(Sx)-EKR-Z (SEQ ID NO: 1916), X-FQREIFGRQS*M-C(Sx)-EKR-Z (SEQ ID NO: 1917), X-FQREKFGRQS*M-C(Sx)-EKR-Z (SEQ ID NO: 1918), X-FQRELFGRQS*M-C(Sx)-EKR-Z (SEQ ID NO: 1919), X-FQRENFGRQS*M-C(Sx)-EKR-Z (SEQ ID NO: 1920), X-FQREPFGRQS*M-C(Sx)-EKR-Z (SEQ ID NO: 1921), X-FQREQFGRQS*M-C(Sx)-EKR-Z (SEQ ID NO: 1922), X-FQRERFGRQS*M-C(Sx)-EKR-Z (SEQ ID NO: 1923), X-FQREVFGRQS*M-C(Sx)-EKR-Z (SEQ ID NO: 1924), X-FQREWFGRQS*M-C(Sx)-EKR-Z (SEQ ID NO: 1925), X-FQRFGFGRQS*M-C(Sx)-EKR-Z (SEQ ID NO: 1926), X-FQRGGFGRQS*M-C(Sx)-EKR-Z (SEQ ID NO: 1927), X-FQRHGFGRQS*M-C(Sx)-EKR-Z (SEQ ID NO: 1928), X-FQRIGFGRQS*M-C(Sx)-EKR-Z (SEQ ID NO: 1929), X-FQRKGFGRQS*M-C(Sx)-EKR-Z (SEQ ID NO: 1930), X-FQRLGFGRQS*M-C(Sx)-EKR-Z (SEQ ID NO: 1931), X-FQRNGFGRQS*M-C(Sx)-EKR-Z (SEQ ID NO: 1932), X-FQRPGFGRQS*M-C(Sx)-EKR-Z (SEQ ID NO: 1933), X-FQRQGFGRQS*M-C(Sx)-EKR-Z (SEQ ID NO: 1934), X-FQRRGFGRQS*M-C(Sx)-EKR-Z (SEQ ID NO: 1935), X-FQRVGFGRQS*M-C(Sx)-EKR-Z (SEQ ID NO: 1936), X-FQRWGFGRQS*M-C(Sx)-EKR-Z (SEQ ID NO: 1937), X-FQVEGFGRQS*M-C(Sx)-EKR-Z (SEQ ID NO: 1938), X-FQWEGFGRQS*M-C(Sx)-EKR-Z (SEQ ID NO: 1939), X-FRR-C(Sx)-AS*FRRR-Z (SEQ ID NO: 1940), X-FRREGFGRQS*M-C(Sx)-EKR-Z (SEQ ID NO: 1941), X-FVREGFGRQS*M-C(Sx)-EKR-Z (SEQ ID NO: 1942), and X-FWREGFGRQS*M-C(Sx)-EKR-Z (SEQ ID NO: 1943); wherein X— is H or acetyl; and Z is OH or NH2.

[0126] In some embodiments, the metal-binding compound of the present invention is selected from the group consisting of: X-GAKTTKKRPQRATS*N-C(Sx)-FS-Z (SEQ ID NO: 1944), X-GAKTTKKRPQRATSN-C(Sx)-FS*-Z (SEQ ID NO: 1945), X-GANPLMA-C(Sx)-GT*LTRRHQNGRF-Z (SEQ ID NO: 1946), X-G-C(Sx)-DS*LRRKAK-Z (SEQ ID NO: 1947), X-G-C(Sx)-LS*PGPF-Z (SEQ ID NO: 1948), X-GDGS*D-C(Sx)-PY[pY]NSIPSK-Z (SEQ ID NO: 1949), X-GDGS*D-C(Sx)-PYYNSIPSK-Z (SEQ ID NO: 1950), X-GEKS*F-C(Sx)-RSVVGTPAY-Z (SEQ ID NO: 1951), X-GEKSF-C(Sx)-RS*VVGTPAY-Z (SEQ ID NO: 1165), X-GEKSFRRS*V-C(Sx)-GTPAY-Z (SEQ ID NO: 1164), X-GEKSFRRSV-C(Sx)-GT*PAY-Z (SEQ ID NO: 1952), X-GETSLMRT*L-C(Sx)-GTPTY-Z (SEQ ID NO: 1953), X-GETSLMRTL-C(Sx)-GT*PTY-Z (SEQ ID NO: 1954), X-GGPEPGPYA-C(Sx)-PS*VNT-Z (SEQ ID NO: 1955), X-GGSSGT*S-C(Sx)-EKGPE-Z (SEQ ID NO: 1187), X-GHVEEPAS*P-C(Sx)-AAYQK-Z (SEQ ID NO: 1070), X-GKKALRRQES*V-C(Sx)-ALGW-Z (SEQ ID NO: 1020), X-GKKAT-C(Sx)-AS*QEY-Z (SEQ ID NO: 1956), X-GKKATQAS*Q-C(Sx)-Y-Z (SEQ ID NO: 1127), X-GKRPQRAT*S-C(Sx)-VFAMF-Z (SEQ ID NO: 1957), X-GLLR-C(Sx)-SS*RRIRR-Z (SEQ ID NO: 1958), X-GLSGRKSS*T-C(Sx)-SPTSP-Z (SEQ ID NO: 1095), X-GNLLP[Nle]S*P-C(Sx)-EFD-Z (SEQ ID NO: 1959), X-GQL-C(Sx)-DS*[Nle]ANSFVGTR-Z (SEQ ID NO: 1960), X-GQLIDS*[Nle]-C(Sx)-NSFVGTR-Z (SEQ ID NO: 1961), X-GQLIDS[Nle]ANS*F-C(Sx)-GTR-Z (SEQ ID NO: 1962), X-GQLIDS[Nle]ANSF-C(Sx)-GT*R-Z (SEQ ID NO: 1963), X-GQLIDS[Nle]-C(Sx)-NS*FVGTR-Z (SEQ ID NO: 1964), X-GQREGFGRQS*M-C(Sx)-EKR-Z (SEQ ID NO: 1965), X-GRDK-C(Sx)-KT*LRQIRQG-Z (SEQ ID NO: 1966), X-GRDKYKT*L-C(Sx)-QIRQG-Z (SEQ ID NO: 1967), X-GREKR-C(Sx)-NS*QSYIGRP-Z (SEQ ID NO: 1159), X-GREKRSNS*Q-C(Sx)-YIGRP-Z (SEQ ID NO: 1158), X-GRPR-C(Sx)-SS*FAEG-Z (SEQ ID NO: 1968), X-GRR-C(Sx)-AS*FRRR-Z (SEQ ID NO: 1969), X-GSASASGS*P-C(Sx)-DPGF-Z (SEQ ID NO: 1970), X-GSNQEEAYV-C(Sx)-[Nle]S*SFY-Z (SEQ ID NO: 1971), X-GVRRR-C(Sx)-LS*NVSLTGV-Z (SEQ ID NO: 1155), X-GVRRRRLS*N-C(Sx)-SLTGV-Z (SEQ ID NO: 1154), X-GYAKDV-C(Sx)-QGS*LCTSFVGTLQYLAKKK-Z (SEQ ID NO: 1009), X-GYAKDVDQGS*L-C(Sx)-TSFVGTLQYLAKKK-Z (SEQ ID NO: 1010), X-GYAKDVDQGSL-C(Sx)-TS*FVGTLQYLAKKK-Z (SEQ ID NO: 1011), X-GYAKDVDQGSLCTS*F-C(Sx)-GTLQYLA-Z (SEQ ID NO: 1012), X-GYAKDVDQGSLCTSF-C(Sx)-GT*LQYLA-Z (SEQ ID NO: 1972), X-HAKTTKKRPQRATS*N-C(Sx)-FS-Z (SEQ ID NO: 1973), X-HAKTTKKRPQRATSN-C(Sx)-FS*-Z (SEQ ID NO: 1974), X-HANPLMA-C(Sx)-GT*LTRRHQNGRF-Z (SEQ ID NO: 1975), X-H-C(Sx)-DS*LRRKAK-Z (SEQ ID NO: 1976), X-H-C(Sx)-LS*PGPF-Z (SEQ ID NO: 1977), X-HKRPQRAT*S-C(Sx)-VFAMF-Z (SEQ ID NO: 1978), X-HLLR-C(Sx)-SS*RRIRR-Z (SEQ ID NO: 1979), X-HLPWWR-C(Sx)-YT*WVVERDVNTKQR-Z (SEQ ID NO: 1980), X-HQREGFGRQS*M-C(Sx)-EKR-Z (SEQ ID NO: 1981), X-HRR-C(Sx)-AS*FRRR-Z (SEQ ID NO: 1982), X-I[Nle]LR-C(Sx)-SS*RRIRR-Z (SEQ ID NO: 1983), X-IADLG-C(Sx)-AS*FK[Nle]WSKL-Z (SEQ ID NO: 1984), X-IADLG-C(Sx)-AS*FKMWSKL-Z (SEQ ID NO: 1985), X-IADLGLAS*F-C(Sx)-[Nle]WSKL-Z (SEQ ID NO: 1986), X-IAKTTKKRPQRATS*N-C(Sx)-FS-Z (SEQ ID NO: 1987), X-IAKTTKKRPQRATSN-C(Sx)-FS*-Z (SEQ ID NO: 1988), X-IALR-C(Sx)-SS*RRIRR-Z (SEQ ID NO: 1989), X-IANPLMA-C(Sx)-GT*LTRRHQNGRF-Z (SEQ ID NO: 1990), X-I-C(Sx)-DS*LRRKAK-Z (SEQ ID NO: 1991), X-I-C(Sx)-LS*PGPF-Z (SEQ ID NO: 1992), X-I-C(Sx)-TS*PITTYFFFKKK-Z (SEQ ID NO: 1193), X-I-C(Sx)-TT*PITITYFFFKKK-Z (SEQ ID NO: 1993), X-IDLR-C(Sx)-SS*RRIRR-Z (SEQ ID NO: 1994), X-IDQGD-C(Sx)-MT*PQFTPYY-Z (SEQ ID NO: 1025), X-IDQGDLMT*P-C(Sx)-FTPYY-Z (SEQ ID NO: 1024); wherein X— is H or acetyl; and Z is OH or NH2.

[0127] In some embodiments, the metal-binding compound of the present invention is selected from the group consisting of: X-IELR-C(Sx)-SS*RRIRR-Z (SEQ ID NO: 1995), X-IFLR-C(Sx)-SS*RRIRR-Z (SEQ ID NO: 1996), X-IGLR-C(Sx)-SS*RRIRR-Z (SEQ ID NO: 1997), X-IHLR-C(Sx)-SS*RRIRR-Z (SEQ ID NO: 1998), X-IIHRD-C(Sx)-KS*NNIFLHE-Z (SEQ ID NO: 1999), X-IIHRDLKS*N-C(Sx)-IFLHE-Z (SEQ ID NO: 2000), X-IILR-C(Sx)-SS*RRIRR-Z (SEQ ID NO: 2001), X-IKLR-C(Sx)-SS*RRIRR-Z (SEQ ID NO: 2002), X-IKRPQRAT*S-C(Sx)-VFAMF-Z (SEQ ID NO: 2003), X-IL[Nle]R-C(Sx)-SS*RRIRR-Z (SEQ ID NO: 2004), X-ILAR-C(Sx)-SS*RRIRR-Z (SEQ ID NO: 2005), X-ILDR-C(Sx)-SS*RRIRR-Z (SEQ ID NO: 2006), X-ILER-C(Sx)-SS*RRIRR-Z (SEQ ID NO: 2007), X-ILFR-C(Sx)-SS*RRIRR-Z (SEQ ID NO: 2008), X-ILGR-C(Sx)-SS*RRIRR-Z (SEQ ID NO: 2009), X-ILHR-C(Sx)-SS*RRIRR-Z (SEQ ID NO: 2010), X-ILIR-C(Sx)-SS*RRIRR-Z (SEQ ID NO: 2011), X-ILKR-C(Sx)-SS*RRIRR-Z (SEQ ID NO: 2012), X-ILL[Nle]-C(Sx)-SS*RRIRR-Z (SEQ ID NO: 2013), X-ILL[Nle]ESS*R-C(Sx)-RIRSGNKLGRIGRN-Z (SEQ ID NO: 2014), X-ILL[pS]ESS*R-C(Sx)-RIRSGNKLGR-Z (SEQ ID NO: 2015), X-ILLA-C(Sx)-SS*RRIRR-Z (SEQ ID NO: 2016), X-ILLAESS*R-C(Sx)-RIRSGNKLGRIGRN-Z (SEQ ID NO: 2017), X-ILLD-C(Sx)-SS*RRIRR-Z (SEQ ID NO: 2018), X-ILLDESS*R-C(Sx)-RIRSGNKLGRIGRN-Z (SEQ ID NO: 2019), X-ILLE-C(Sx)-SS*RRIRR-Z (SEQ ID NO: 2020), X-ILLEESS*R-C(Sx)-RIRSGNKLGRIGRN-Z (SEQ ID NO: 2021), X-ILLF-C(Sx)-SS*RRIRR-Z (SEQ ID NO: 2022), X-ILLFESS*R-C(Sx)-RIRSGNKLGRIGRN-Z (SEQ ID NO: 2023), X-ILLG-C(Sx)-SS*RRIRR-Z (SEQ ID NO: 2024), X-ILLGESS*R-C(Sx)-RIRSGNKLGRIGRN-Z (SEQ ID NO: 2025), X-ILLH-C(Sx)-SS*RRIRR-Z (SEQ ID NO: 2026), X-ILLHESS*R-C(Sx)-RIRSGNKLGRIGRN-Z (SEQ ID NO: 2027), X-ILLI-C(Sx)-SS*RRIRR-Z (SEQ ID NO: 2028), X-ILLIESS*R-C(Sx)-RIRSGNKLGRIGRN-Z (SEQ ID NO: 2029), X-ILLK-C(Sx)-SS*RRIRR-Z (SEQ ID NO: 2030), X-ILLKESS*R-C(Sx)-RIRSGNKLGRIGRN-Z (SEQ ID NO: 2031), X-ILLL-C(Sx)-SS*RRIRR-Z (SEQ ID NO: 2032), X-ILLLESS*R-C(Sx)-RIRSGNKLGRIGRN-Z (SEQ ID NO: 2033), X-ILLN-C(Sx)-SS*RRIRR-Z (SEQ ID NO: 2034), X-ILLNESS*R-C(Sx)-RIRSGNKLGRIGRN-Z (SEQ ID NO: 2035), X-ILLP-C(Sx)-SS*RRIRR-Z (SEQ ID NO: 2036), X-ILLPESS*R-C(Sx)-RIRSGNKLGRIGRN-Z (SEQ ID NO: 2037), X-ILLQ-C(Sx)-SS*RRIRR-Z (SEQ ID NO: 2038), X-ILLQESS*R-C(Sx)-RIRSGNKLGRIGRN-Z (SEQ ID NO: 2039), X-ILLR-C(Sx)-[Nle]S*RRIRR-Z (SEQ ID NO: 2040), X-ILLR-C(Sx)-AS*RRIRR-Z (SEQ ID NO: 2041), X-ILLR-C(Sx)-DS*RRIRR-Z (SEQ ID NO: 2042), X-ILLR-C(Sx)-ES*RRIRR-Z (SEQ ID NO: 2043), X-ILLR-C(Sx)-FS*RRIRR-Z (SEQ ID NO: 2044), X-ILLR-C(Sx)-GS*RRIRR-Z (SEQ ID NO: 2045), X-ILLR-C(Sx)-HS*RRIRR-Z (SEQ ID NO: 2046), X-ILLR-C(Sx)-IS*RRIRR-Z (SEQ ID NO: 2047), X-ILLR-C(Sx)-KS*RRIRR-Z (SEQ ID NO: 2048), X-ILLR-C(Sx)-LS**RRIRR-Z (SEQ ID NO: 2049), X-ILLR-C(Sx)-NS*RRIRR-Z (SEQ ID NO: 2050), X-ILLR-C(Sx)-PS*RRIRR-Z (SEQ ID NO: 2051), X-ILLR-C(Sx)-QS*RRIRR-Z (SEQ ID NO: 2052), X-ILLR-C(Sx)-RS*RRIRR-Z (SEQ ID NO: 2053), X-ILLR-C(Sx)-SS*[Nle]RIRR-Z (SEQ ID NO: 2054), X-ILLR-C(Sx)-SS*ARIRR-Z (SEQ ID NO: 2055), X-ILLR-C(Sx)-SS*DRIRR-Z (SEQ ID NO: 2056), X-ILLR-C(Sx)-SS*ERIRR-Z (SEQ ID NO: 2057), X-ILLR-C(Sx)-SS*FRIRR-Z (SEQ ID NO: 2058), X-ILLR-C(Sx)-SS*GRIRR-Z (SEQ ID NO: 2059), X-ILLR-C(Sx)-SS*HRIRR-Z (SEQ ID NO: 2060), X-ILLR-C(Sx)-SS*IRIRR-Z (SEQ ID NO: 2061), X-ILLR-C(Sx)-SS*KRIRR-Z (SEQ ID NO: 2062), X-ILLR-C(Sx)-SS*LRIRR-Z (SEQ ID NO: 2063), X-ILLR-C(Sx)-SS*NRIRR-Z (SEQ ID NO: 2064), X-ILLR-C(Sx)-SS*PRIRR-Z (SEQ ID NO: 2065), X-ILLR-C(Sx)-SS*QRIRR-Z (SEQ ID NO: 2066), X-ILLR-C(Sx)-SS*R[Nle]IRR-Z (SEQ ID NO: 2067), and X-ILLR-C(Sx)-SS*RAIRR-Z (SEQ ID NO: 2068), X-ILLR-C(Sx)-SS*RDIRR-Z (SEQ ID NO: 2069); wherein X is H or acetyl; and Z is OH or NH2.

[0128] In some embodiments, the metal-binding compound of the present invention is selected from the group consisting of: X-ILLR-C(Sx)-SS*REIRR-Z (SEQ ID NO: 2070), X-ILLR-C(Sx)-SS*RFIRR-Z (SEQ ID NO: 2071), X-ILLR-C(Sx)-SS*RGIRR-Z (SEQ ID NO: 2072), X-ILLR-C(Sx)-SS*RHIRR-Z (SEQ ID NO: 2073), X-ILLR-C(Sx)-SS*RIIRR-Z (SEQ ID NO: 2074), X-ILLR-C(Sx)-SS*RKIRR-Z (SEQ ID NO: 2075), X-ILLR-C(Sx)-SS*RLIRR-Z (SEQ ID NO: 2076), X-ILLR-C(Sx)-SS*RNIRR-Z (SEQ ID NO: 2077), X-ILLR-C(Sx)-SS*RPIRR-Z (SEQ ID NO: 2078), X-ILLR-C(Sx)-SS*RQIRR-Z (SEQ ID NO: 2079), X-ILLR-C(Sx)-SS*RR[Nle]RR-Z (SEQ ID NO: 2080), X-ILLR-C(Sx)-SS*RRARR-Z (SEQ ID NO: 2081), X-ILLR-C(Sx)-SS*RRDRR-Z (SEQ ID NO: 2082), X-ILLR-C(Sx)-SS*RRERR-Z (SEQ ID NO: 2083), X-ILLR-C(Sx)-SS*RRFRR-Z (SEQ ID NO: 2084), X-ILLR-C(Sx)-SS*RRGRR-Z (SEQ ID NO: 2085), X-ILLR-C(Sx)-SS*RRHRR-Z (SEQ ID NO: 2086), X-ILLR-C(Sx)-SS*RRI[Nle]R-Z (SEQ ID NO: 2087), X-ILLR-C(Sx)-SS*RRIAR-Z (SEQ ID NO: 2088), X-ILLR-C(Sx)-SS*RRIDR-Z (SEQ ID NO: 2089), X-ILLR-C(Sx)-SS*RRIER-Z (SEQ ID NO: 2090), X-ILLR-C(Sx)-SS*RRIFR-Z (SEQ ID NO: 2091), X-ILLR-C(Sx)-SS*RRIGR-Z (SEQ ID NO: 2092), X-ILLR-C(Sx)-SS*RRIHR-Z (SEQ ID NO: 2093), X-ILLR-C(Sx)-SS*RRIIR-Z (SEQ ID NO: 2094), X-ILLR-C(Sx)-SS*RRIKR-Z (SEQ ID NO: 2095), X-ILLR-C(Sx)-SS*RRILR-Z (SEQ ID NO: 2096), X-ILLR-C(Sx)-SS*RRINR-Z (SEQ ID NO: 2097), X-ILLR-C(Sx)-SS*RRIPR-Z (SEQ ID NO: 2098), X-ILLR-C(Sx)-SS*RRIQR-Z (SEQ ID NO: 2099), X-ILLR-C(Sx)-SS*RRIR[Nle]-Z (SEQ ID NO: 2100), X-ILLR-C(Sx)-SS*RRIRA-Z (SEQ ID NO: 2101), X-ILLR-C(Sx)-SS*RRIRD-Z (SEQ ID NO: 2102), X-ILLR-C(Sx)-SS*RRIRE-Z (SEQ ID NO: 2103), X-ILLR-C(Sx)-SS*RRIRF-Z (SEQ ID NO: 2104), X-ILLR-C(Sx)-SS*RRIRG-Z (SEQ ID NO: 2105), X-ILLR-C(Sx)-SS*RRIRH-Z (SEQ ID NO: 2106), X-ILLR-C(Sx)-SS*RRIRI-Z (SEQ ID NO: 2107), X-ILLR-C(Sx)-SS*RRIRK-Z (SEQ ID NO: 2108), X-ILLR-C(Sx)-SS*RRIRL-Z (SEQ ID NO: 2109), X-ILLR-C(Sx)-SS*RRIRN-Z (SEQ ID NO: 2110), X-ILLR-C(Sx)-SS*RRIRP-Z (SEQ ID NO: 2111), X-ILLR-C(Sx)-SS*RRIRQ-Z (SEQ ID NO: 2112), X-ILLR-C(Sx)-SS*RRIRV-Z (SEQ ID NO: 2113), X-ILLR-C(Sx)-SS*RRIRW-Z (SEQ ID NO: 2114), X-ILLR-C(Sx)-SS*RRIVR-Z (SEQ ID NO: 2115), X-ILLR-C(Sx)-SS*RRIWR-Z (SEQ ID NO: 2116), X-ILLR-C(Sx)-SS*RRKRR-Z (SEQ ID NO: 2117), X-ILLR-C(Sx)-SS*RRLRR-Z (SEQ ID NO: 2118), X-ILLR-C(Sx)-SS*RRNRR-Z (SEQ ID NO: 2119), X-ILLR-C(Sx)-SS*RRPRR-Z (SEQ ID NO: 2120), X-ILLR-C(Sx)-SS*RRQRR-Z (SEQ ID NO: 2121), X-ILLR-C(Sx)-SS*RRRRR-Z (SEQ ID NO: 2122), X-ILLR-C(Sx)-SS*RRVRR-Z (SEQ ID NO: 2123), X-ILLR-C(Sx)-SS*RRWRR-Z (SEQ ID NO: 2124), X-ILLR-C(Sx)-SS*RVIRR-Z (SEQ ID NO: 2125), X-ILLR-C(Sx)-SS*RWIRR-Z (SEQ ID NO: 2126), X-ILLR-C(Sx)-SS*VRIRR-Z (SEQ ID NO: 2127), X-ILLR-C(Sx)-SS*WRIRR-Z (SEQ ID NO: 2128), X-ILLR-C(Sx)-VS*RRIRR-Z (SEQ ID NO: 2129), X-ILLR-C(Sx)-WS*RRIRR-Z (SEQ ID NO: 2130), X-ILLRESS*R-C(Sx)-RIRSGNKLGRIGRN-Z (SEQ ID NO: 2131), X-ILLS [Nle]SS*R-C(Sx)-RIRSGNKLGRIGRN-Z (SEQ ID NO: 2132), X-ILLSASS*R-C(Sx)-RIRSGNKLGRIGRN-Z (SEQ ID NO: 2133), X-ILLS-C(Sx)-LS*RRR-Z (SEQ ID NO: 2134), X-ILLSDSS*R-C(Sx)-RIRSGNKLGRIGRN-Z (SEQ ID NO: 2135), X-ILLSE[Nle]S*R-C(Sx)-RIRSGNKLGRIGRN-Z (SEQ ID NO: 2136), X-ILLSEAS*R-C(Sx)-RIRSGNKLGRIGRN-Z (SEQ ID NO: 2137), X-ILLSEDS*R-C(Sx)-RIRSGNKLGRIGRN-Z (SEQ ID NO: 2138), X-ILLSEES*R-C(Sx)-RIRSGNKLGRIGRN-Z (SEQ ID NO: 2139), X-ILLSEFS*R-C(Sx)-RIRSGNKLGRIGRN-Z (SEQ ID NO: 2140), X-ILLSEGS*R-C(Sx)-RIRSGNKLGRIGRN-Z (SEQ ID NO: 2141), X-ILLSEHS*R-C(Sx)-RIRSGNKLGRIGRN-Z (SEQ ID NO: 2142), X-ILLSEIS*R-C(Sx)-RIRSGNKLGRIGRN-Z (SEQ ID NO: 2143), X-ILLSEKS*R-C(Sx)-RIRSGNKLGRIGRN-Z (SEQ ID NO: 2144), X-ILLSELS*R-C(Sx)-RIRSGNKLGRIGRN-Z (SEQ ID NO: 2145), X-ILLSENS*R-C(Sx)-RIRSGNKLGRIGRN-Z (SEQ ID NO: 2146), X-ILLSEPS*R-C(Sx)-RIRSGNKLGRIGRN-Z (SEQ ID NO: 2147), X-ILLSEQS*R-C(Sx)-RIRSGNKLGRIGRN-Z (SEQ ID NO: 2148), X-ILLSERS*R-C(Sx)-RIRSGNKLGRIGRN-Z (SEQ ID NO: 2149); wherein X— is H or acetyl; and Z is OH or NH2.

[0129] In some embodiments, the metal-binding compound of the present invention is selected from the group consisting of: X-ILLSESS*[Nle]-C(Sx)-RIRSGNKLGRIGRN-Z (SEQ ID NO: 2150), X-ILLSESS*A-C(Sx)-RIRSGNKLGRIGRN-Z (SEQ ID NO: 2151), X-ILLSESS*D-C(Sx)-RIRSGNKLGRIGRN-Z (SEQ ID NO: 2152), X-ILLSESS*E-C(Sx)-RIRSGNKLGRIGRN-Z (SEQ ID NO: 2153), X-ILLSESS*F-C(Sx)-RIRSGNKLGRIGRN-Z (SEQ ID NO: 2154), X-ILLSESS*G-C(Sx)-RIRSGNKLGRIGRN-Z (SEQ ID NO: 2155), X-ILLSESS*H-C(Sx)-RIRSGNKLGRIGRN-Z (SEQ ID NO: 2156), X-ILLSESS*I-C(Sx)-RIRSGNKLGRIGRN-Z (SEQ ID NO: 2157), X-ILLSESS*K-C(Sx)-RIRSGNKLGRIGRN-Z (SEQ ID NO: 2158), X-ILLSESS*L-C(Sx)-RIRSGNKLGRIGRN-Z (SEQ ID NO: 2159), X-ILLSESS*N-C(Sx)-RIRSGNKLGRIGRN-Z (SEQ ID NO: 2160), X-ILLSESS*P-C(Sx)-RIRSGNKLGRIGRN-Z (SEQ ID NO: 2161), X-ILLSESS*Q-C(Sx)-RIRSGNKLGRIGRN-Z (SEQ ID NO: 2162), X-ILLSESS*R-C(Sx)-[Nle]IRSGNKLGRIGRN-Z (SEQ ID NO: 2163), X-ILLSESS*R-C(Sx)-AIRSGNKLGRIGRN-Z (SEQ ID NO: 2164), X-ILLSESS*R-C(Sx)-DIRSGNKLGRIGRN-Z (SEQ ID NO: 2165), X-ILLSESS*R-C(Sx)-EIRSGNKLGRIGRN-Z (SEQ ID NO: 2166), X-ILLSESS*R-C(Sx)-FIRSGNKLGRIGRN-Z (SEQ ID NO: 2167), X-ILLSESS*R-C(Sx)-GIRSGNKLGRIGRN-Z (SEQ ID NO: 2168), X-ILLSESS*R-C(Sx)-HIRSGNKLGRIGRN-Z (SEQ ID NO: 2169), X-ILLSESS*R-C(Sx)-IIRSGNKLGRIGRN-Z (SEQ ID NO: 2170), X-ILLSESS*R-C(Sx)-KIRSGNKLGRIGRN-Z (SEQ ID NO: 2171), X-ILLSESS*R-C(Sx)-LIRSGNKLGRIGRN-Z (SEQ ID NO: 2172), X-ILLSESS*R-C(Sx)-NIRSGNKLGRIGRN-Z (SEQ ID NO: 2173), X-ILLSESS*R-C(Sx)-PIRSGNKLGRIGRN-Z (SEQ ID NO: 2174), X-ILLSESS*R-C(Sx)-QIRSGNKLGRIGRN-Z (SEQ ID NO: 2175), X-ILLSESS*R-C(Sx)-R[Nle]RSGNKLGRIGRN-Z (SEQ ID NO: 2176), X-ILLSESS*R-C(Sx)-RARSGNKLGRIGRN-Z (SEQ ID NO: 2177), X-ILLSESS*R-C(Sx)-RDRSGNKLGRIGRN-Z (SEQ ID NO: 2178), X-ILLSESS*R-C(Sx)-RERSGNKLGRIGRN-Z (SEQ ID NO: 2179), X-ILLSESS*R-C(Sx)-RFRSGNKLGRIGRN-Z (SEQ ID NO: 2180), X-ILLSESS*R-C(Sx)-RGRSGNKLGRIGRN-Z (SEQ ID NO: 2181), X-ILLSESS*R-C(Sx)-RHRSGNKLGRIGRN-Z (SEQ ID NO: 2182), X-ILLSESS*R-C(Sx)-RI[Nle]SGNKLGRIGRN-Z (SEQ ID NO: 2183), X-ILLSESS*R-C(Sx)-RIASGNKLGRIGRN-Z (SEQ ID NO: 2184), X-ILLSESS*R-C(Sx)-RIDSGNKLGRIGRN-Z (SEQ ID NO: 2185), X-ILLSESS*R-C(Sx)-RIESGNKLGRIGRN-Z (SEQ ID NO: 2186), X-ILLSESS*R-C(Sx)-RIFSGNKLGRIGRN-Z (SEQ ID NO: 2187), X-ILLSESS*R-C(Sx)-RIGSGNKLGRIGRN-Z (SEQ ID NO: 2188), X-ILLSESS*R-C(Sx)-RIHSGNKLGRIGRN-Z (SEQ ID NO: 2189), X-ILLSESS*R-C(Sx)-RIISGNKLGRIGRN-Z (SEQ ID NO: 2190), X-ILLSESS*R-C(Sx)-RIKSGNKLGRIGRN-Z (SEQ ID NO: 2191), X-ILLSESS*R-C(Sx)-RILSGNKLGRIGRN-Z (SEQ ID NO: 2192), X-ILLSESS*R-C(Sx)-RINSGNKLGRIGRN-Z (SEQ ID NO: 2193), X-ILLSESS*R-C(Sx)-RIPSGNKLGRIGRN-Z (SEQ ID NO: 2194), X-ILLSESS*R-C(Sx)-RIQSGNKLGRIGRN-Z (SEQ ID NO: 2195), X-ILLSESS*R-C(Sx)-RIR[Nle]GNKLGRIGRN-Z (SEQ ID NO: 2196), X-ILLSESS*R-C(Sx)-RIRAGNKLGRIGRN-Z (SEQ ID NO: 2197), X-ILLSESS*R-C(Sx)-RIRDGNKLGRIGRN-Z (SEQ ID NO: 2198), X-ILLSESS*R-C(Sx)-RIREGNKLGRIGRN-Z (SEQ ID NO: 2199), X-ILLSESS*R-C(Sx)-RIRFGNKLGRIGRN-Z (SEQ ID NO: 2200), X-ILLSESS*R-C(Sx)-RIRGGNKLGRIGRN-Z (SEQ ID NO: 2201), X-ILLSESS*R-C(Sx)-RIRHGNKLGRIGRN-Z (SEQ ID NO: 2202), X-ILLSESS*R-C(Sx)-RIRIGNKLGRIGRN-Z (SEQ ID NO: 2203), X-ILLSESS*R-C(Sx)-RIRKGNKLGRIGRN-Z (SEQ ID NO: 2204), X-ILLSESS*R-C(Sx)-RIRLGNKLGRIGRN-Z (SEQ ID NO: 2205), X-ILLSESS*R-C(Sx)-RIRNGNKLGRIGRN-Z (SEQ ID NO: 2206), X-ILLSESS*R-C(Sx)-RIRPGNKLGRIGRN-Z (SEQ ID NO: 2207), X-ILLSESS*R-C(Sx)-RIRQGNKLGRIGRN-Z (SEQ ID NO: 2208), X-ILLSESS*R-C(Sx)-RIRRGNKLGRIGRN-Z (SEQ ID NO: 2209), and X-ILLSESS*R-C(Sx)-RIRS[Nle]NKLGRIGRN-Z (SEQ ID NO: 2210); wherein X is H or acetyl; and Z is OH or NH2.

[0130] In some embodiments, the metal-binding compound of the present invention is selected from the group consisting of: X-ILLSESS*R-C(Sx)-RIRSANKLGRIGRN-Z (SEQ ID NO: 2211), X-ILLSESS*R-C(Sx)-RIRSDNKLGRIGRN-Z (SEQ ID NO: 2212), X-ILLSESS*R-C(Sx)-RIRSENKLGRIGRN-Z (SEQ ID NO: 2213), X-ILLSESS*R-C(Sx)-RIRSFNKLGRIGRN-Z (SEQ ID NO: 2214), X-ILLSESS*R-C(Sx)-RIRSG[Nle]KLGRIGRN-Z (SEQ ID NO: 2215), X-ILLSESS*R-C(Sx)-RIRSGAKLGRIGRN-Z (SEQ ID NO: 2216), X-ILLSESS*R-C(Sx)-RIRSGDKLGRIGRN-Z (SEQ ID NO: 2217), X-ILLSESS*R-C(Sx)-RIRSGEKLGRIGRN-Z (SEQ ID NO: 2218), X-ILLSESS*R-C(Sx)-RIRSGFKLGRIGRN-Z (SEQ ID NO: 2219), X-ILLSESS*R-C(Sx)-RIRSGGKLGRIGRN-Z (SEQ ID NO: 2220), X-ILLSESS*R-C(Sx)-RIRSGHKLGRIGRN-Z (SEQ ID NO: 2221), X-ILLSESS*R-C(Sx)-RIRSGIKLGRIGRN-Z (SEQ ID NO: 2222), X-ILLSESS*R-C(Sx)-RIRSGKKLGRIGRN-Z (SEQ ID NO: 2223), X-ILLSESS*R-C(Sx)-RIRSGLKLGRIGRN-Z (SEQ ID NO: 2224), X-ILLSESS*R-C(Sx)-RIRSGN[Nle]LGRIGRN-Z (SEQ ID NO: 2225), X-ILLSESS*R-C(Sx)-RIRSGNALGRIGRN-Z (SEQ ID NO: 2226), X-ILLSESS*R-C(Sx)-RIRSGNDLGRIGRN-Z (SEQ ID NO: 2227), X-ILLSESS*R-C(Sx)-RIRSGNELGRIGRN-Z (SEQ ID NO: 2228), X-ILLSESS*R-C(Sx)-RIRSGNFLGRIGRN-Z (SEQ ID NO: 2229), X-ILLSESS*R-C(Sx)-RIRSGNGLGRIGRN-Z (SEQ ID NO: 2230), X-ILLSESS*R-C(Sx)-RIRSGNHLGRIGRN-Z (SEQ ID NO: 2231), X-ILLSESS*R-C(Sx)-RIRSGNILGRIGRN-Z (SEQ ID NO: 2232), X-ILLSESS*R-C(Sx)-RIRSGNK[Nle]GRIGRN-Z (SEQ ID NO: 2233), X-ILLSESS*R-C(Sx)-RIRSGNKAGRIGRN-Z (SEQ ID NO: 2234), X-ILLSESS*R-C(Sx)-RIRSGNKDGRIGRN-Z (SEQ ID NO: 2235), X-ILLSESS*R-C(Sx)-RIRSGNKEGRIGRN-Z (SEQ ID NO: 2236), X-ILLSESS*R-C(Sx)-RIRSGNKFGRIGRN-Z (SEQ ID NO: 2237), X-ILLSESS*R-C(Sx)-RIRSGNKGGRIGRN-Z (SEQ ID NO: 2238), X-ILLSESS*R-C(Sx)-RIRSGNKHGRIGRN-Z (SEQ ID NO: 2239), X-ILLSESS*R-C(Sx)-RIRSGNKIGRIGRN-Z (SEQ ID NO: 2240), X-ILLSESS*R-C(Sx)-RIRSGNKKGRIGRN-Z (SEQ ID NO: 2241), X-ILLSESS*R-C(Sx)-RIRSGNKL[Nle]RIGRN-Z (SEQ ID NO: 2242), X-ILLSESS*R-C(Sx)-RIRSGNKLARIGRN-Z (SEQ ID NO: 2243), X-ILLSESS*R-C(Sx)-RIRSGNKLDRIGRN-Z (SEQ ID NO: 2244), X-ILLSESS*R-C(Sx)-RIRSGNKLERIGRN-Z (SEQ ID NO: 2245), X-ILLSESS*R-C(Sx)-RIRSGNKLFRIGRN-Z (SEQ ID NO: 2246), X-ILLSESS*R-C(Sx)-RIRSGNKLG[Nle]IGRN-Z (SEQ ID NO: 2247), X-ILLSESS*R-C(Sx)-RIRSGNKLGAIGRN-Z (SEQ ID NO: 2248), X-ILLSESS*R-C(Sx)-RIRSGNKLGDIGRN-Z (SEQ ID NO: 2249), X-ILLSESS*R-C(Sx)-RIRSGNKLGEIGRN-Z (SEQ ID NO: 2250), X-ILLSESS*R-C(Sx)-RIRSGNKLGFIGRN-Z (SEQ ID NO: 2251), X-ILLSESS*R-C(Sx)-RIRSGNKLGGIGRN-Z (SEQ ID NO: 2252), X-ILLSESS*R-C(Sx)-RIRSGNKLGHIGRN-Z (SEQ ID NO: 2253), X-ILLSESS*R-C(Sx)-RIRSGNKLGIIGRN-Z (SEQ ID NO: 2254), X-ILLSESS*R-C(Sx)-RIRSGNKLGKIGRN-Z (SEQ ID NO: 2255), X-ILLSESS*R-C(Sx)-RIRSGNKLGLIGRN-Z (SEQ ID NO: 2256), X-ILLSESS*R-C(Sx)-RIRSGNKLGNIGRN-Z (SEQ ID NO: 2257), X-ILLSESS*R-C(Sx)-RIRSGNKLGPIGRN-Z (SEQ ID NO: 2258), X-ILLSESS*R-C(Sx)-RIRSGNKLGQIGRN-Z (SEQ ID NO: 2259), X-ILLSESS*R-C(Sx)-RIRSGNKLGR[Nle]GRN-Z (SEQ ID NO: 2260), X-ILLSESS*R-C(Sx)-RIRSGNKLGRAGRN-Z (SEQ ID NO: 2261), X-ILLSESS*R-C(Sx)-RIRSGNKLGRDGRN-Z (SEQ ID NO: 2262), X-ILLSESS*R-C(Sx)-RIRSGNKLGREGRN-Z (SEQ ID NO: 2263), X-ILLSESS*R-C(Sx)-RIRSGNKLGRFGRN-Z (SEQ ID NO: 2264), X-ILLSESS*R-C(Sx)-RIRSGNKLGRGGRN-Z (SEQ ID NO: 2265), X-ILLSESS*R-C(Sx)-RIRSGNKLGRHGRN-Z (SEQ ID NO: 2266), X-ILLSESS*R-C(Sx)-RIRSGNKLGRIGRN-Z (SEQ ID NO: 2267), X-ILLSESS*R-C(Sx)-RIRSGNKLGRKGRN-Z (SEQ ID NO: 2268), X-ILLSESS*R-C(Sx)-RIRSGNKLGRLGRN-Z (SEQ ID NO: 2269), X-ILLSESS*R-C(Sx)-RIRSGNKLGRNGRN-Z (SEQ ID NO: 2270), X-ILLSESS*R-C(Sx)-RIRSGNKLGRPGRN-Z (SEQ ID NO: 2271), and X-ILLSESS*R-C(Sx)-RIRSGNKLGRQGRN-Z (SEQ ID NO: 2272); wherein X is H or acetyl; and Z is OH or NH2.

[0131] In some embodiments, the metal-binding compound of the present invention is selected from the group consisting of: X-ILLSESS*R-C(Sx)-RIRSGNKLGRRGRN-Z (SEQ ID NO: 2273), X-ILLSESS*R-C(Sx)-RIRSGNKLGRVGRN-Z (SEQ ID NO: 2274), X-ILLSESS*R-C(Sx)-RIRSGNKLGRWGRN-Z (SEQ ID NO: 2275), X-ILLSESS*R-C(Sx)-RIRSGNKLGR-Z (SEQ ID NO: 2276), X-ILLSESS*R-C(Sx)-RIRSGNKLGVIGRN-Z (SEQ ID NO: 2277), X-ILLSESS*R-C(Sx)-RIRSGNKLGWIGRN-Z (SEQ ID NO: 2278), X-ILLSESS*R-C(Sx)-RIRSGNKLHRIGRN-Z (SEQ ID NO: 2279), X-ILLSESS*R-C(Sx)-RIRSGNKLIRIGRN-Z (SEQ ID NO: 2280), X-ILLSESS*R-C(Sx)-RIRSGNKLKRIGRN-Z (SEQ ID NO: 2281), X-ILLSESS*R-C(Sx)-RIRSGNKLLRIGRN-Z (SEQ ID NO: 2282), X-ILLSESS*R-C(Sx)-RIRSGNKLNRIGRN-Z (SEQ ID NO: 2283), X-ILLSESS*R-C(Sx)-RIRSGNKLPRIGRN-Z (SEQ ID NO: 2284), X-ILLSESS*R-C(Sx)-RIRSGNKLQRIGRN-Z (SEQ ID NO: 2285), X-ILLSESS*R-C(Sx)-RIRSGNKLRRIGRN-Z (SEQ ID NO: 2286), X-ILLSESS*R-C(Sx)-RIRSGNKLVRIGRN-Z (SEQ ID NO: 2287), X-ILLSESS*R-C(Sx)-RIRSGNKLWRIGRN-Z (SEQ ID NO: 2288), X-ILLSESS*R-C(Sx)-RIRSGNKNGRIGRN-Z (SEQ ID NO: 2289), X-ILLSESS*R-C(Sx)-RIRSGNKPGRIGRN-Z (SEQ ID NO: 2290), X-ILLSESS*R-C(Sx)-RIRSGNKQGRIGRN-Z (SEQ ID NO: 2291), X-ILLSESS*R-C(Sx)-RIRSGNKRGRIGRN-Z (SEQ ID NO: 2292), X-ILLSESS*R-C(Sx)-RIRSGNKVGRIGRN-Z (SEQ ID NO: 2293), X-ILLSESS*R-C(Sx)-RIRSGNKWGRIGRN-Z (SEQ ID NO: 2294), X-ILLSESS*R-C(Sx)-RIRSGNLLGRIGRN-Z (SEQ ID NO: 2295), X-ILLSESS*R-C(Sx)-RIRSGNNLGRIGRN-Z (SEQ ID NO: 2296), X-ILLSESS*R-C(Sx)-RIRSGNPLGRIGRN-Z (SEQ ID NO: 2297), X-ILLSESS*R-C(Sx)-RIRSGNQLGRIGRN-Z (SEQ ID NO: 2298), X-ILLSESS*R-C(Sx)-RIRSGNRLGRIGRN-Z (SEQ ID NO: 2299), X-ILLSESS*R-C(Sx)-RIRSGNVLGRIGRN-Z (SEQ ID NO: 2300), X-ILLSESS*R-C(Sx)-RIRSGNWLGRIGRN-Z (SEQ ID NO: 2301), X-ILLSESS*R-C(Sx)-RIRSGPKLGRIGRN-Z (SEQ ID NO: 2302), X-ILLSESS*R-C(Sx)-RIRSGQKLGRIGRN-Z (SEQ ID NO: 2303), X-ILLSESS*R-C(Sx)-RIRSGRKLGRIGRN-Z (SEQ ID NO: 2304), X-ILLSESS*R-C(Sx)-RIRSGVKLGRIGRN-Z (SEQ ID NO: 2305), X-ILLSESS*R-C(Sx)-RIRSGWKLGRIGRN-Z (SEQ ID NO: 2306), X-ILLSESS*R-C(Sx)-RIRSHNKLGRIGRN-Z (SEQ ID NO: 2307), X-ILLSESS*R-C(Sx)-RIRSINKLGRIGRN-Z (SEQ ID NO: 2308), X-ILLSESS*R-C(Sx)-RIRSKNKLGRIGRN-Z (SEQ ID NO: 2309), X-ILLSESS*R-C(Sx)-RIRSLNKLGRIGRN-Z (SEQ ID NO: 2310), X-ILLSESS*R-C(Sx)-RIRSNNKLGRIGRN-Z (SEQ ID NO: 2311), X-ILLSESS*R-C(Sx)-RIRSPNKLGRIGRN-Z (SEQ ID NO: 2312), X-ILLSESS*R-C(Sx)-RIRSQNKLGRIGRN-Z (SEQ ID NO: 2313), X-ILLSESS*R-C(Sx)-RIRSRNKLGRIGRN-Z (SEQ ID NO: 2314), X-ILLSESS*R-C(Sx)-RIRSVNKLGRIGRN-Z (SEQ ID NO: 2315), X-ILLSESS*R-C(Sx)-RIRSWNKLGRIGRN-Z (SEQ ID NO: 2316), X-ILLSESS*R-C(Sx)-RIRVGNKLGRIGRN-Z (SEQ ID NO: 2317), X-ILLSESS*R-C(Sx)-RIRWGNKLGRIGRN-Z (SEQ ID NO: 2318), X-ILLSESS*R-C(Sx)-RIVSGNKLGRIGRN-Z (SEQ ID NO: 2319), X-ILLSESS*R-C(Sx)-RIWSGNKLGRIGRN-Z (SEQ ID NO: 2320), X-ILLSESS*R-C(Sx)-RKRSGNKLGRIGRN-Z (SEQ ID NO: 2321), X-ILLSESS*R-C(Sx)-RLRSGNKLGRIGRN-Z (SEQ ID NO: 2322), and X-ILLSESS*R-C(Sx)-RNRSGNKLGRIGRN-Z (SEQ ID NO: 2323); wherein X is H or acetyl; and Z is OH or NH2.

[0132] In some embodiments, the metal-binding compound of the present invention is selected from the group consisting of: X-ILLSESS*R-C(Sx)-RPRSGNKLGRIGRN-Z (SEQ ID NO: 2324), X-ILLSESS*R-C(Sx)-RQRSGNKLGRIGRN-Z (SEQ ID NO: 2325), X-ILLSESS*R-C(Sx)-RRRSGNKLGRIGRN-Z (SEQ ID NO: 2326), X-ILLSESS*R-C(Sx)-RVRSGNKLGRIGRN-Z (SEQ ID NO: 2327), X-ILLSESS*R-C(Sx)-RWRSGNKLGRIGRN-Z (SEQ ID NO: 2328), X-ILLSESS*R-C(Sx)-VIRSGNKLGRIGRN-Z (SEQ ID NO: 2329), X-ILLSESS*R-C(Sx)-WIRSGNKLGRIGRN-Z (SEQ ID NO: 2330), X-ILLSESS*V-C(Sx)-RIRSGNKLGRIGRN-Z (SEQ ID NO: 2331), X-ILLSESS*W-C(Sx)-RIRSGNKLGRIGRN-Z (SEQ ID NO: 2332), X-ILLSEVS*R-C(Sx)-RIRSGNKLGRIGRN-Z (SEQ ID NO: 2333), X-ILLSEWS*R-C(Sx)-RIRSGNKLGRIGRN-Z (SEQ ID NO: 2334), X-ILLSFSS*R-C(Sx)-RIRSGNKLGRIGRN-Z (SEQ ID NO: 2335), X-ILLSGSS*R-C(Sx)-RIRSGNKLGRIGRN-Z (SEQ ID NO: 2336), X-ILLSHSS*R-C(Sx)-RIRSGNKLGRIGRN-Z (SEQ ID NO: 2337), X-ILLSISS*R-C(Sx)-RIRSGNKLGRIGRN-Z (SEQ ID NO: 2338), X-ILLSKSS*R-C(Sx)-RIRSGNKLGRIGRN-Z (SEQ ID NO: 2339), X-ILLSLSS*R-C(Sx)-RIRSGNKLGRIGRN-Z (SEQ ID NO: 2340), X-ILLSNSS*R-C(Sx)-RIRSGNKLGRIGRN-Z (SEQ ID NO: 2341), X-ILLSPSS*R-C(Sx)-RIRSGNKLGRIGRN-Z (SEQ ID NO: 2342), X-ILLSQSS*R-C(Sx)-RIRSGNKLGRIGRN-Z (SEQ ID NO: 2343), X-ILLSRSS*R-C(Sx)-RIRSGNKLGRIGRN-Z (SEQ ID NO: 2344), X-ILLSVSS*R-C(Sx)-RIRSGNKLGRIGRN-Z (SEQ ID NO: 2345), X-ILLSWSS*R-C(Sx)-RIRSGNKLGRIGRN-Z (SEQ ID NO: 2346), X-ILLV-C(Sx)-SS*RRIRR-Z (SEQ ID NO: 2347), X-ILLVESS*R-C(Sx)-RIRSGNKLGRIGRN-Z (SEQ ID NO: 2348), X-ILLW-C(Sx)-SS*RRIRR-Z (SEQ ID NO: 2349), X-ILLWESS*R-C(Sx)-RIRSGNKLGRIGRN-Z (SEQ ID NO: 2350), X-ILNR-C(Sx)-SS*RRIRR-Z (SEQ ID NO: 2351), X-ILPR-C(Sx)-SS*RRIRR-Z (SEQ ID NO: 2352), X-ILPWWR-C(Sx)-YT*WVVERDVNTKQR-Z (SEQ ID NO: 2353), X-ILQR-C(Sx)-SS*RRIRR-Z (SEQ ID NO: 2354), X-ILRR-C(Sx)-SS*RRIRR-Z (SEQ ID NO: 2355), X-ILVR-C(Sx)-SS*RRIRR-Z (SEQ ID NO: 2356), X-ILWR-C(Sx)-SS*RRIRR-Z (SEQ ID NO: 2357), X-INLR-C(Sx)-SS*RRIRR-Z (SEQ ID NO: 2358), X-IPLR-C(Sx)-SS*RRIRR-Z (SEQ ID NO: 2359); wherein X— is H or acetyl; and Z is OH or NH2.

[0133] In some embodiments, the metal-binding compound of the present invention is selected from the group consisting of: X-IPTT*P-C(Sx)-TTTYFFFKKK-Z (SEQ ID NO: 2360), X-IPTTP-C(Sx)-TT*TYFFFKKK-Z (SEQ ID NO: 2361), X-IQLR-C(Sx)-SS*RRIRR-Z (SEQ ID NO: 2362), X-IQREGFGRQS*M-C(Sx)-EKR-Z (SEQ ID NO: 2363), X-IRLR-C(Sx)-SS*RRIRR-Z (SEQ ID NO: 2364), X-IRR-C(Sx)-AS*FRRR-Z (SEQ ID NO: 2365), X-IS*G-C(Sx)-LSPI[Nle]TEQ-Z (SEQ ID NO: 2366), X-ISG-C(Sx)-LS*PI[Nle]TEQ-Z (SEQ ID NO: 2367), X-ISGRLS*P-C(Sx)-[Nle]TEQ-Z (SEQ ID NO: 2368), X-ISGRLSP-C(Sx)-[Nle]T*EQ-Z (SEQ ID NO: 2369), X-IVLR-C(Sx)-SS*RRIRR-Z (SEQ ID NO: 2370), X-IWLR-C(Sx)-SS*RRIRR-Z (SEQ ID NO: 2371), X-K[Nle]EVEELS*P-C(Sx)-ALGRF-Z (SEQ ID NO: 2372), X-K[Nle]KTTKKRPQRATS*N-C(Sx)-FS-Z (SEQ ID NO: 2373), X-K[Nle]KTTKKRPQRATSN-C(Sx)-FS*-Z (SEQ ID NO: 2374), X-K[Nle]RPQRAT*S-C(Sx)-VFAMF-Z (SEQ ID NO: 2375), X-KA[Nle]TTKKRPQRATS*N-C(Sx)-FS-Z (SEQ ID NO: 2376), X-KA[Nle]TTKKRPQRATSN-C(Sx)-FS*-Z (SEQ ID NO: 2377), X-KADTTKKRPQRATS*N-C(Sx)-FS-Z (SEQ ID NO: 2378), X-KADTTKKRPQRATSN-C(Sx)-FS*-Z (SEQ ID NO: 2379), X-KAETTKKRPQRATS*N-C(Sx)-FS-Z (SEQ ID NO: 2380), X-KAETTKKRPQRATSN-C(Sx)-FS*-Z (SEQ ID NO: 2381), X-KAFTTKKRPQRATS*N-C(Sx)-FS-Z (SEQ ID NO: 2382), X-KAFTTKKRPQRATSN-C(Sx)-FS*-Z (SEQ ID NO: 2383), X-KAGTTKKRPQRATS*N-C(Sx)-FS-Z (SEQ ID NO: 2384), X-KAGTTKKRPQRATSN-C(Sx)-FS*-Z (SEQ ID NO: 2385), X-KAHTTKKRPQRATS*N-C(Sx)-FS-Z (SEQ ID NO: 2386), X-KAHTTKKRPQRATSN-C(Sx)-FS*-Z (SEQ ID NO: 2387), X-KAITTKKRPQRATS*N-C(Sx)-FS-Z (SEQ ID NO: 2388), X-KAITTKKRPQRATSN-C(Sx)-FS*-Z (SEQ ID NO: 2389), X-KAK[Nle]TKKRPQRATS*N-C(Sx)-FS-Z (SEQ ID NO: 2390), X-KAK[Nle]TKKRPQRATSN-C(Sx)-FS*-Z (SEQ ID NO: 2391), X-KAKDTKKRPQRATS*N-C(Sx)-FS-Z (SEQ ID NO: 2392), X-KAKDTKKRPQRATSN-C(Sx)-FS*-Z (SEQ ID NO: 2393), X-KAKETKKRPQRATS*N-C(Sx)-FS-Z (SEQ ID NO: 2394), X-KAKETKKRPQRATSN-C(Sx)-FS*-Z (SEQ ID NO: 2395), X-KAKFTKKRPQRATS*N-C(Sx)-FS-Z (SEQ ID NO: 2396), X-KAKFTKKRPQRATSN-C(Sx)-FS*-Z (SEQ ID NO: 2397), X-KAKGTKKRPQRATS*N-C(Sx)-FS-Z (SEQ ID NO: 2398), X-KAKGTKKRPQRATSN-C(Sx)-FS*-Z (SEQ ID NO: 2399), X-KAKHTKKRPQRATS*N-C(Sx)-FS-Z (SEQ ID NO: 2400), X-KAKHTKKRPQRATSN-C(Sx)-FS*-Z (SEQ ID NO: 2401), X-KAKITKKRPQRATS*N-C(Sx)-FS-Z (SEQ ID NO: 2402), X-KAKITKKRPQRATSN-C(Sx)-FS*-Z (SEQ ID NO: 2403), X-KAKKKKKRPQRADS*D-C(Sx)-FA-Z (SEQ ID NO: 2404), X-KAKKKKKRPQRADS*D-C(Sx)-FS-Z (SEQ ID NO: 2405), X-KAKKKKKRPQRADS*N-C(Sx)-FA-Z (SEQ ID NO: 2406), X-KAKKKKKRPQRADS*N-C(Sx)-FS-Z (SEQ ID NO: 2407), X-KAKKKKKRPQRADSD-C(Sx)-FS*-Z (SEQ ID NO: 2408), X-KAKKKKKRPQRADSN-C(Sx)-FS*-Z (SEQ ID NO: 2409), X-KAKKKKKRPQRAES*D-C(Sx)-FA-Z (SEQ ID NO: 2410), X-KAKKKKKRPQRAES*D-C(Sx)-FS-Z (SEQ ID NO: 2411), X-KAKKKKKRPQRAES*N-C(Sx)-FA-Z (SEQ ID NO: 2412), X-KAKKKKKRPQRAES*N-C(Sx)-FS-Z (SEQ ID NO: 2413), X-KAKKKKKRPQRAESD-C(Sx)-FS*-Z (SEQ ID NO: 2414), X-KAKKKKKRPQRAESN-C(Sx)-FS*-Z (SEQ ID NO: 2415), X-KAKKKKKRPQRAHS*D-C(Sx)-FA-Z (SEQ ID NO: 2416), X-KAKKKKKRPQRAHS*D-C(Sx)-FS-Z (SEQ ID NO: 2417), X-KAKKKKKRPQRAHS*N-C(Sx)-FA-Z (SEQ ID NO: 2418), X-KAKKKKKRPQRAHS*N-C(Sx)-FS-Z (SEQ ID NO: 2419), and X-KAKKKKKRPQRAHSD-C(Sx)-FS*-Z (SEQ ID NO: 2420); wherein X is H or acetyl; and Z is OH or NH2.

[0134] In some embodiments, the metal-binding compound of the present invention is selected from the group consisting of: X-KAKKKKKRPQRAHSN-C(Sx)-FS*-Z (SEQ ID NO: 2421), X-KAKKKKKRPQRATS*D-C(Sx)-FA-Z (SEQ ID NO: 2422), X-KAKKKKKRPQRATS*D-C(Sx)-FS-Z (SEQ ID NO: 2423), X-KAKKKKKRPQRATS*N-C(Sx)-FA-Z (SEQ ID NO: 2424), X-KAKKKKKRPQRATS*N-C(Sx)-FS-Z (SEQ ID NO: 2425), X-KAKKKKKRPQRATSD-C(Sx)-FS*-Z (SEQ ID NO: 2426), X-KAKKKKKRPQRATSN-C(Sx)-FS*-Z (SEQ ID NO: 2427), X-KAKKRAGGANS*N-C(Sx)-FS[Nle]F-Z (SEQ ID NO: 2428), X-KAKKRAGGANS*N-C(Sx)-FSMF-Z (SEQ ID NO: 2429), X-KAKKRAGGANS*N-C(Sx)-FS-Z (SEQ ID NO: 2430), X-KAKKRAGGANSN-C(Sx)-FS*[Nle]F-Z (SEQ ID NO: 2431), X-KAKKRAGGANSN-C(Sx)-FS*MF-Z (SEQ ID NO: 2432), X-KAKKRAGGANSN-C(Sx)-FS*-Z (SEQ ID NO: 2433), X-KAKKRAGGANSNVFS*[Nle]-C(Sx)-EQ-Z (SEQ ID NO: 2434), X-KAKKRAGGANSNVFS*[Nle]-C(Sx)-Z (SEQ ID NO: 2435), X-KAKKRAGGANSNVFS*M-C(Sx)-EQ-Z (SEQ ID NO: 2436), X-KAKKRAGGANSNVFS*M-C(Sx)-Z (SEQ ID NO: 2437), X-KAKKRAGG-C(Sx)-NS*NVFS[Nle]F-Z (SEQ ID NO: 2438), X-KAKKRAGG-C(Sx)-NS*NVFSMF-Z (SEQ ID NO: 2439), X-KAKKRAGG-C(Sx)-NS*NVFS-Z (SEQ ID NO: 2440), X-KCAKKRKKRPQRADS*D-C(Sx)-FA-Z (SEQ ID NO: 2441), X-KCAKKRKKRPQRADS*D-C(Sx)-FS-Z (SEQ ID NO: 2442), X-KCAKKRKKRPQRADS*N-C(Sx)-FA-Z (SEQ ID NO: 2443), X-KAKKRKKRPQRADS*N-C(Sx)-FS-Z (SEQ ID NO: 2444), X-KCAKKRKKRPQRADSD-C(Sx)-FS*-Z (SEQ ID NO: 2445), X-KAKKRKKRPQRADSN-C(Sx)-FS*-Z (SEQ ID NO: 2446), X-KAKKRKKRPQRAES*D-C(Sx)-FA-Z (SEQ ID NO: 2447), X-KAKKRKKRPQRAES*D-C(Sx)-FS-Z (SEQ ID NO: 2448), X-KCAKKRKKRPQRAES*N-C(Sx)-FA-Z (SEQ ID NO: 2449), X-KAKKRKKRPQRAES*N-C(Sx)-FS-Z (SEQ ID NO: 2450), X-KCAKKRKKRPQRAESD-C(Sx)-FS*-Z (SEQ ID NO: 2451), X-KAKKRKKRPQRAESN-C(Sx)-FS*-Z (SEQ ID NO: 2452), X-KAKKRKKRPQRAHS*D-C(Sx)-FA-Z (SEQ ID NO: 2453), X-KAKKRKKRPQRAHS*D-C(Sx)-FS-Z (SEQ ID NO: 2454), X-KCAKKRKKRPQRAHS*N-C(Sx)-FA-Z (SEQ ID NO: 2455), X-KAKKRKKRPQRAHS*N-C(Sx)-FS-Z (SEQ ID NO: 2456), X-KCAKKRKKRPQRAHSD-C(Sx)-FS*-Z (SEQ ID NO: 2457), X-KAKKRKKRPQRAHSN-C(Sx)-FS*-Z (SEQ ID NO: 2458), X-KAKKRKKRPQRATS*D-C(Sx)-FA-Z (SEQ ID NO: 2459), X-KAKKRKKRPQRATS*D-C(Sx)-FS-Z (SEQ ID NO: 2460), X-KAKKRKKRPQRATS*N-C(Sx)-FA-Z (SEQ ID NO: 2461), X-KAKKRKKRPQRATS*N-C(Sx)-FS-Z (SEQ ID NO: 2462), X-KCAKKRKKRPQRATSD-C(Sx)-FS*-Z (SEQ ID NO: 2463), X-KAKKRKKRPQRATSN-C(Sx)-FS*-Z (SEQ ID NO: 2464), X-KKKTKKRPQRADS*D-(Sx)-FA-Z (SEQ ID NO: 2465), X-KAKKTKKRPQRADS*D-C(Sx)-FS-Z (SEQ ID NO: 2466), X-KAKKTKKRPQRADS*N-C(Sx)-FA-Z (SEQ ID NO: 2467), X-KAKKTKKRPQRADS*N-C(Sx)-FS-Z (SEQ ID NO: 2468), X-KAKKTKKRPQRADSD-C(Sx)-FS*-Z (SEQ ID NO: 2469), X-KAKKTKKRPQRADSN-C(Sx)-FS*-Z (SEQ ID NO: 2470), X-KAKKTKKRPQRAES*D-C(Sx)-FA-Z (SEQ ID NO: 2471), X-KAKKTKKRPQRAES*D-C(Sx)-FS-Z (SEQ ID NO: 2472), X-KAKKTKKRPQRAES*N-C(Sx)-FA-Z (SEQ ID NO: 2473), X-KAKKTKKRPQRAES*N-C(Sx)-FS-Z (SEQ ID NO: 2474), X-KAKKTKKRPQRAESD-C(Sx)-FS*-Z (SEQ ID NO: 2475), X-KAKKTKKRPQRAESN-C(Sx)-FS*-Z (SEQ ID NO: 2476), X-KKKTKKRPQRAHS*D-(Sx)-FA-Z (SEQ ID NO: 2477), X-KAKKTKKRPQRAHS*D-C(Sx)-FS-Z (SEQ ID NO: 2478), X-KAKKTKKRPQRAHS*N-C(Sx)-FA-Z (SEQ ID NO: 2479), X-KAKKTKKRPQRAHS*N-C(Sx)-FS-Z (SEQ ID NO: 2480), X-KAKKTKKRPQRAHSD-C(Sx)-FS*-Z (SEQ ID NO: 2481), X-KAKKTKKRPQRAHSN-C(Sx)-FS*-Z (SEQ ID NO: 2482), X-KAKKTKKRPQRATS*D-C(Sx)-FA-Z (SEQ ID NO: 2483), X-KAKKTKKRPQRATS*D-C(Sx)-FS-Z (SEQ ID NO: 2484), X-KAKKTKKRPQRATS*N-C(Sx)-FA-Z (SEQ ID NO: 2485), X-KAKKTKKRPQRATS*N-C(Sx)-FS-Z (SEQ ID NO: 2486), X-KAKKTKKRPQRATSD-C(Sx)-FS*-Z (SEQ ID NO: 2487), X-KAKKTKKRPQRATSN-C(Sx)-FS*-Z (SEQ ID NO: 2488), X-KAKKVKKRPQRADS*D-C(Sx)-FA-Z (SEQ ID NO: 2489), X-KAKKVKKRPQRADS*D-C(Sx)-FS-Z (SEQ ID NO: 2490), X-KAKKVKKRPQRADS*N-C(Sx)-FA-Z (SEQ ID NO: 2491), X-KAKKVKKRPQRADS*N-C(Sx)-FS-Z (SEQ ID NO: 2492), X-KAKKVKKRPQRADSD-C(Sx)-FS*-Z (SEQ ID NO: 2493), X-KAKKVKKRPQRADSN-C(Sx)-FS*-Z (SEQ ID NO: 2494), X-KAKKVKKRPQRAES*D-C(Sx)-FA-Z (SEQ ID NO: 2495), X-KAKKVKKRPQRAES*D-C(Sx)-FS-Z (SEQ ID NO: 2496), X-KAKKVKKRPQRAES*N-C(Sx)-FA-Z (SEQ ID NO: 2497), X-KAKKVKKRPQRAES*N-C(Sx)-FS-Z (SEQ ID NO: 2498), X-KAKKVKKRPQRAESD-C(Sx)-FS*-Z (SEQ ID NO: 2499), X-KAKKVKKRPQRAESN-C(Sx)-FS*-Z (SEQ ID NO: 2500), X-KAKKVKKRPQRAHS*D-C(Sx)-FA-Z (SEQ ID NO: 2501), X-KAKKVKKRPQRAHS*D-C(Sx)-FS-Z (SEQ ID NO: 2502), X-KAKKVKKRPQRAHS*N-C(Sx)-FA-Z (SEQ ID NO: 2503), and X-KAKKVKKRPQRAHS*N-C(Sx)-FS-Z (SEQ ID NO: 2504); wherein X— is H or acetyl; and Z is OH or NH2.

[0135] In some embodiments, the metal-binding compound of the present invention is selected from the group consisting of: X-KAKKVKKRPQRAHSD-C(Sx)-FS*-Z (SEQ ID NO: 2505), X-KAKKVKKRPQRAHSN-C(Sx)-FS*-Z (SEQ ID NO: 2506), X-KAKKVKKRPQRATS*D-C(Sx)-FA-Z (SEQ ID NO: 2507), X-KAKKVKKRPQRATS*D-C(Sx)-FS-Z (SEQ ID NO: 2508), X-KAKKVKKRPQRATS*N-C(Sx)-FA-Z (SEQ ID NO: 2509), X-KAKKVKKRPQRATS*N-C(Sx)-FS-Z (SEQ ID NO: 2510), X-KAKKVKKRPQRATSD-C(Sx)-FS*-Z (SEQ ID NO: 2511), X-KAKKVKKRPQRATSN-C(Sx)-FS*-Z (SEQ ID NO: 2512), X-KAKLTKKRPQRATS*N-C(Sx)-FS-Z (SEQ ID NO: 2513), X-KAKLTKKRPQRATSN-C(Sx)-FS*-Z (SEQ ID NO: 2514), X-KAKNTKKRPQRATS*N-C(Sx)-FS-Z (SEQ ID NO: 2515), X-KAKNTKKRPQRATSN-C(Sx)-FS*-Z (SEQ ID NO: 2516), X-KAKPTKKRPQRATS*N-C(Sx)-FS-Z (SEQ ID NO: 2517), X-KAKPTKKRPQRATSN-C(Sx)-FS*-Z (SEQ ID NO: 2518), X-KAKRTKKRPQRATS*N-C(Sx)-FS-Z (SEQ ID NO: 2519), X-KAKRTKKRPQRATSN-C(Sx)-FS*-Z (SEQ ID NO: 2520), X-KAKT[Nle]KKRPQRATS*N-C(Sx)-FS-Z (SEQ ID NO: 2521), X-KAKT[Nle]KKRPQRATSN-C(Sx)-FS*-Z (SEQ ID NO: 2522), X-KAKTDKKRPQRATS*N-C(Sx)-FS-Z (SEQ ID NO: 2523), X-KAKTDKKRPQRATSN-C(Sx)-FS*-Z (SEQ ID NO: 2524), X-KAKTEKKRPQRATS*N-C(Sx)-FS-Z (SEQ ID NO: 2525), X-KAKTEKKRPQRATSN-C(Sx)-FS*-Z (SEQ ID NO: 2526), X-KAKTFKKRPQRATS*N-C(Sx)-FS-Z (SEQ ID NO: 2527), X-KAKTFKKRPQRATSN-C(Sx)-FS*-Z (SEQ ID NO: 2528), X-KAKTGKKRPQRATS*N-C(Sx)-FS-Z (SEQ ID NO: 2529), X-KAKTGKKRPQRATSN-C(Sx)-FS*-Z (SEQ ID NO: 2530), X-KAKTHKKRPQRATS*N-C(Sx)-FS-Z (SEQ ID NO: 2531), X-KAKTHKKRPQRATSN-C(Sx)-FS*-Z (SEQ ID NO: 2532), X-KAKTIKKRPQRATS*N-C(Sx)-FS-Z (SEQ ID NO: 2533), X-KAKTIKKRPQRATSN-C(Sx)-FS*-Z (SEQ ID NO: 2534), X-KAKTKKKRPQRADS*D-C(Sx)-FA-Z (SEQ ID NO: 2535), X-KAKTKKKRPQRADS*D-C(Sx)-FS-Z (SEQ ID NO: 2536), X-KAKTKKKRPQRADS*N-C(Sx)-FA-Z (SEQ ID NO: 2537), X-KAKTKKKRPQRADS*N-C(Sx)-FS-Z (SEQ ID NO: 2538), X-KAKTKKKRPQRADSD-C(Sx)-FS*-Z (SEQ ID NO: 2539), X-KAKTKKKRPQRADSN-C(Sx)-FS*-Z (SEQ ID NO: 2540), X-KAKTKKKRPQRAES*D-C(Sx)-FA-Z (SEQ ID NO: 2541), X-KAKTKKKRPQRAES*D-C(Sx)-FS-Z (SEQ ID NO: 2542), X-KAKTKKKRPQRAES*N-C(Sx)-FA-Z (SEQ ID NO: 2543), X-KAKTKKKRPQRAES*N-C(Sx)-FS-Z (SEQ ID NO: 2544), X-KAKTKKKRPQRAESD-C(Sx)-FS*-Z (SEQ ID NO: 2545), X-KAKTKKKRPQRAESN-C(Sx)-FS*-Z (SEQ ID NO: 2546), X-KAKTKKKRPQRAHS*D-C(Sx)-FA-Z (SEQ ID NO: 2547), X-KAKTKKKRPQRAHS*D-C(Sx)-FS-Z (SEQ ID NO: 2548), X-KAKTKKKRPQRAHS*N-C(Sx)-FA-Z (SEQ ID NO: 2549), X-KAKTKKKRPQRAHS*N-C(Sx)-FS-Z (SEQ ID NO: 2550), X-KAKTKKKRPQRAHSD-C(Sx)-FS*-Z (SEQ ID NO: 2551), and X-KAKTKKKRPQRAHSN-C(Sx)-FS*-Z (SEQ ID NO: 2552), wherein X is H or acetyl; and Z is OH or NH2.

[0136] In some embodiments, the metal-binding compound of the present invention is selected from the group consisting of: X-KAKTKKKRPQRATS*D-C(Sx)-FA-Z (SEQ ID NO: 2553), X-KAKTKKKRPQRATS*D-C(Sx)-FS-Z (SEQ ID NO: 2554), X-KAKTKKKRPQRATS*N-C(Sx)-FA-Z (SEQ ID NO: 2555), X-KAKTKKKRPQRATS*N-C(Sx)-FS-Z (SEQ ID NO: 2556), X-KAKTKKKRPQRATSD-C(Sx)-FS*-Z (SEQ ID NO: 2557), X-KAKTKKKRPQRATSN-C(Sx)-FS*-Z (SEQ ID NO: 2558), X-KAKTLKKRPQRATS*N-C(Sx)-FS-Z (SEQ ID NO: 2559), X-KAKTLKKRPQRATSN-C(Sx)-FS*-Z (SEQ ID NO: 2560), X-KAKTNKKRPQRATS*N-C(Sx)-FS-Z (SEQ ID NO: 2561), X-KAKTNKKRPQRATSN-C(Sx)-FS*-Z (SEQ ID NO: 2562), X-KAKTPKKRPQRATS*N-C(Sx)-FS-Z (SEQ ID NO: 2563), X-KAKTPKKRPQRATSN-C(Sx)-FS*-Z (SEQ ID NO: 2564), X-KAKTRKKRPQRADS*D-C(Sx)-FA-Z (SEQ ID NO: 2565), X-KAKTRKKRPQRADS*D-C(Sx)-FS-Z (SEQ ID NO: 2566), X-KAKTRKKRPQRADS*N-C(Sx)-FA-Z (SEQ ID NO: 2567), X-KAKTRKKRPQRADS*N-C(Sx)-FS-Z (SEQ ID NO: 2568), X-KAKTRKKRPQRADSD-C(Sx)-FS*-Z (SEQ ID NO: 2569), X-KAKTRKKRPQRADSN-C(Sx)-FS*-Z (SEQ ID NO: 2570), X-KAKTRKKRPQRAES*D-C(Sx)-FA-Z (SEQ ID NO: 2571), X-KAKTRKKRPQRAES*D-C(Sx)-FS-Z (SEQ ID NO: 2572), X-KAKTRKKRPQRAES*N-C(Sx)-FA-Z (SEQ ID NO: 2573), X-KAKTRKKRPQRAES*N-C(Sx)-FS-Z (SEQ ID NO: 2574), X-KAKTRKKRPQRAESD-C(Sx)-FS*-Z (SEQ ID NO: 2575), X-KAKTRKKRPQRAESN-C(Sx)-FS*-Z (SEQ ID NO: 2576), X-KAKTRKKRPQRAHS*D-C(Sx)-FA-Z (SEQ ID NO: 2577), X-KAKTRKKRPQRAHS*D-C(Sx)-FS-Z (SEQ ID NO: 2578), X-KAKTRKKRPQRAHS*N-C(Sx)-FA-Z (SEQ ID NO: 2579), X-KAKTRKKRPQRAHS*N-C(Sx)-FS-Z (SEQ ID NO: 2580), X-KAKTRKKRPQRAHSD-C(Sx)-FS*-Z (SEQ ID NO: 2581), X-KAKTRKKRPQRAHSN-C(Sx)-FS*-Z (SEQ ID NO: 2582), X-KAKTRKKRPQRATS*D-C(Sx)-FA-Z (SEQ ID NO: 2583), X-KAKTRKKRPQRATS*D-C(Sx)-FS-Z (SEQ ID NO: 2584), X-KAKTRKKRPQRATS*N-C(Sx)-FA-Z (SEQ ID NO: 2585), X-KAKTRKKRPQRATS*N-C(Sx)-FS-Z (SEQ ID NO: 2586); wherein X— is H or acetyl; and Z is OH or NH2.

[0137] In some embodiments, the metal-binding compound of the present invention is selected from the group consisting of: X-KAKTRKKRPQRATSD-C(Sx)-FS*-Z (SEQ ID NO: 2587), X-KAKTRKKRPQRATSN-C(Sx)-FS*-Z (SEQ ID NO: 2588), X-KAKTT[Nle]KRPQRATS*N-C(Sx)-FS-Z (SEQ ID NO: 2589), X-KAKTT[Nle]KRPQRATSN-C(Sx)-FS*-Z (SEQ ID NO: 2590), X-KAKTTDKRPQRATS*N-C(Sx)-FS-Z (SEQ ID NO: 2591), X-KAKTDKRPQRATSN-C(Sx)-FS*-Z (SEQ ID NO: 2592), X-KAKTTEKRPQRATS*N-C(Sx)-FS-Z (SEQ ID NO: 2593), X-KAKTTEKRPQRATSN-C(Sx)-FS*-Z (SEQ ID NO: 2594), X-KAKTIFKRPQRATS*N-C(Sx)-FS-Z (SEQ ID NO: 2595), X-KAKTFKRPQRATSN-C(Sx)-FS*-Z (SEQ ID NO: 2596), X-KAKTTGKRPQRATS*N-C(Sx)-FS-Z (SEQ ID NO: 2597), X-KAKTTGKRPQRATSN-C(Sx)-FS*-Z (SEQ ID NO: 2598), X-KAKITHKRPQRATS*N-C(Sx)-FS-Z (SEQ ID NO: 2599), X-KAKITHKRPQRATSN-C(Sx)-FS*-Z (SEQ ID NO: 2600), X-KAKTTIKRPQRATS*N-C(Sx)-FS-Z (SEQ ID NO: 2601), X-KAKTIKRPQRATSN-C(Sx)-FS*-Z (SEQ ID NO: 2602), X-KAKTTK[Nle]RPQRATS*N-C(Sx)-FS-Z (SEQ ID NO: 2603), X-KAKTTK[Nle]RPQRATSN-C(Sx)-FS*-Z (SEQ ID NO: 2604), X-KAKTTKDRPQRATS*N-C(Sx)-FS-Z (SEQ ID NO: 2605), X-KAKTTKDRPQRATSN-C(Sx)-FS*-Z (SEQ ID NO: 2606), X-KAKTTKERPQRATS*N-C(Sx)-FS-Z (SEQ ID NO: 2607), X-KAKTTKERPQRATSN-C(Sx)-FS*-Z (SEQ ID NO: 2608), X-KAKTTKFRPQRATS*N-C(Sx)-FS-Z (SEQ ID NO: 2609), X-KAKTKFRPQRATSN-C(Sx)-FS*-Z (SEQ ID NO: 2610), X-KAKTTKGRPQRATS*N-C(Sx)-FS-Z (SEQ ID NO: 2611), X-KAKTTKGRPQRATSN-C(Sx)-FS*-Z (SEQ ID NO: 2612), X-KAKTTKHRPQRATS*N-C(Sx)-FS-Z (SEQ ID NO: 2613), X-KAKTTKHRPQRATSN-C(Sx)-FS*-Z (SEQ ID NO: 2614), X-KAKTTKIRPQRATS*N-C(Sx)-FS-Z (SEQ ID NO: 2615), X-KAKTTKIRPQRATSN-C(Sx)-FS*-Z (SEQ ID NO: 2616), X-KAKTTKK[Nle]PQRATS*N-C(Sx)-FS-Z (SEQ ID NO: 2617), X-KAKTTKK[Nle]PQRATSN-C(Sx)-FS*-Z (SEQ ID NO: 2618), X-KAKTTKKDPQRATS*N-C(Sx)-FS-Z (SEQ ID NO: 2619), X-KAKTKKDPQRATSN-C(Sx)-FS*-Z (SEQ ID NO: 2620), X-KAKTTKKEPQRATS*N-C(Sx)-FS-Z (SEQ ID NO: 2621), X-KAKTTKKEPQRATSN-C(Sx)-FS*-Z (SEQ ID NO: 2622), X-KAKTTKKFPQRATS*N-C(Sx)-FS-Z (SEQ ID NO: 2623), X-KAKTTKKFPQRATSN-C(Sx)-FS*-Z (SEQ ID NO: 2624), X-KAKTTKKGPQRATS*N-C(Sx)-FS-Z (SEQ ID NO: 2625), X-KAKTTKKGPQRATSN-C(Sx)-FS*-Z (SEQ ID NO: 2626), X-KAKTTKKHPQRATS*N-C(Sx)-FS-Z (SEQ ID NO: 2627), X-KAKTTKKHPQRATSN-C(Sx)-FS*-Z (SEQ ID NO: 2628), X-KAKTTKKIPQRATS*N-C(Sx)-FS-Z (SEQ ID NO: 2629), X-KAKTTKKIPQRATSN-C(Sx)-FS*-Z (SEQ ID NO: 2630), X-KAKTTKKKPQRATS*N-C(Sx)-FS-Z (SEQ ID NO: 2631), X-KAKTTKKKPQRATSN-C(Sx)-FS*-Z (SEQ ID NO: 2632), X-KAKTTKKLPQRATS*N-C(Sx)-FS-Z (SEQ ID NO: 2633), X-KAKTTKKLPQRATSN-C(Sx)-FS*-Z (SEQ ID NO: 2634), X-KAKTTKKNPQRATS*N-C(Sx)-FS-Z (SEQ ID NO: 2635), X-KAKTTKKNPQRATSN-C(Sx)-FS*-Z (SEQ ID NO: 2636), X-KAKTTKKPPQRATS*N-C(Sx)-FS-Z (SEQ ID NO: 2637), X-KAKTTKKPPQRATSN-C(Sx)-FS*-Z (SEQ ID NO: 2638), X-KAKTTKKR[Nle]QRATS*N-C(Sx)-FS-Z (SEQ ID NO: 2639), X-KAKTTKKR[Nle]QRATSN-C(Sx)-FS*-Z (SEQ ID NO: 2640), X-KAKTTKKRDQRATS*N-C(Sx)-FS-Z (SEQ ID NO: 2641), X-KAKTTKKRDQRATSN-C(Sx)-FS*-Z (SEQ ID NO: 2642), X-KAKTTKKREQRATS*N-C(Sx)-FS-Z (SEQ ID NO: 2643), X-KAKTTKKREQRATSN-C(Sx)-FS*-Z (SEQ ID NO: 2644), X-KAKTTKKRFQRATS*N-C(Sx)-FS-Z (SEQ ID NO: 2645), X-KAKTTKKRFQRATSN-C(Sx)-FS*-Z (SEQ ID NO: 2646), X-KAKTTKKRGQRATS*N-C(Sx)-FS-Z (SEQ ID NO: 2647), X-KAKTTKKRGQRATSN-C(Sx)-FS*-Z (SEQ ID NO: 2648), X-KAKTTKKRHQRATS*N-C(Sx)-FS-Z (SEQ ID NO: 2649), X-KAKTITKKRHQRATSN-C(Sx)-FS*-Z (SEQ ID NO: 2650), X-KAKTTKKRIQRATS*N-C(Sx)-FS-Z (SEQ ID NO: 2651), X-KAKTTKKRIQRATSN-C(Sx)-FS*-Z (SEQ ID NO: 2652), X-KAKTTKKRKQRATS*N-C(Sx)-FS-Z (SEQ ID NO: 2653), X-KAKTrKKRKQRATSN-C(Sx)-FS*-Z (SEQ ID NO: 2654), X-KAKTTKKRLQRATS*N-C(Sx)-FS-Z (SEQ ID NO: 2655), X-KAKTTKKRLQRATSN-C(Sx)-FS*-Z (SEQ ID NO: 2656), X-KAKTTKKRNQRATS*N-C(Sx)-FS-Z (SEQ ID NO: 2657), X-KAKTrKKRNQRATSN-C(Sx)-FS*-Z (SEQ ID NO: 2658), X-KAKTTKKRP[Nle]RATS*N-C(Sx)-FS-Z (SEQ ID NO: 2659), X-KAKTTKKRP[Nle]RATSN-C(Sx)-FS*-Z (SEQ ID NO: 2660), and X-KAKTTKKRPDRATS*N-C(Sx)-FS-Z (SEQ ID NO: 2661); wherein X is H or acetyl; and Z is OH or NH2.

[0138] In some embodiments, the metal-binding compound of the present invention is selected from the group consisting of: X-KAKTTKKRPDRATSN-C(Sx)-FS*-Z (SEQ ID NO: 2662), X-KAKTTKKRPERATS*N-C(Sx)-FS-Z (SEQ ID NO: 2663), X-KAKTTKKRPERATSN-C(Sx)-FS*-Z (SEQ ID NO: 2664), X-KAKTTKKRPFRATS*N-C(Sx)-FS-Z (SEQ ID NO: 2665), X-KAKTIKKRPFRATSN-C(Sx)-FS*-Z (SEQ ID NO: 2666), X-KAKTTKKRPGRATS*N-C(Sx)-FS-Z (SEQ ID NO: 2667), X-KAKTITKKRPGRATSN-C(Sx)-FS*-Z (SEQ ID NO: 2668), X-KAKTTKKRPHRATS*N-C(Sx)-FS-Z (SEQ ID NO: 2669), X-KAKTIKKRPHRATSN-C(Sx)-FS*-Z (SEQ ID NO: 2670), X-KAKTTKKRPIRATS*N-C(Sx)-FS-Z (SEQ ID NO: 2671), X-KAKTTKKRPIRATSN-C(Sx)-FS*-Z (SEQ ID NO: 2672), X-KAKTTKKRPKRATS*N-C(Sx)-FS-Z (SEQ ID NO: 2673), X-KAKTIKKRPKRATSN-C(Sx)-FS*-Z (SEQ ID NO: 2674), X-KAKTTKKRPLRATS*N-C(Sx)-FS-Z (SEQ ID NO: 2675), X-KAKTTKKRPLRATSN-C(Sx)-FS*-Z (SEQ ID NO: 2676), X-KAKTTKKRPNRATS*N-C(Sx)-FS-Z (SEQ ID NO: 2677), X-KAKTIKKRPNRATSN-C(Sx)-FS*-Z (SEQ ID NO: 2678), X-KAKTTKKRPPRATS*N-C(Sx)-FS-Z (SEQ ID NO: 2679), X-KAKTTKKRPPRATSN-C(Sx)-FS*-Z (SEQ ID NO: 2680), X-KAKTTKKRPQ[Nle]ATS*N-C(Sx)-FS-Z (SEQ ID NO: 2681), X-KAKTTKKRPQ[Nle]ATSN-C(Sx)-FS*-Z (SEQ ID NO: 2682), X-KAKTTKKRPQDATS*N-C(Sx)-FS-Z (SEQ ID NO: 2683), X-KAKTITKKRPQDATSN-C(Sx)-FS*-Z (SEQ ID NO: 2684), X-KAKTTKKRPQEATS*N-C(Sx)-FS-Z (SEQ ID NO: 2685), X-KAKTIKKRPQEATSN-C(Sx)-FS*-Z (SEQ ID NO: 2686), X-KAKTTKKRPQFATS*N-C(Sx)-FS-Z (SEQ ID NO: 2687), X-KAKTTKKRPQFATSN-C(Sx)-FS*-Z (SEQ ID NO: 2688), X-KAKTTKKRPQGATS*N-C(Sx)-FS-Z (SEQ ID NO: 2689), X-KAKTTKKRPQGATSN-C(Sx)-FS*-Z (SEQ ID NO: 2690), X-KAKTTKKRPQHATS*N-C(Sx)-FS-Z (SEQ ID NO: 2691), X-KAKTTKKRPQHATSN-C(Sx)-FS*-Z (SEQ ID NO: 2692), X-KAKTKKRPQIATS*N-C(Sx)-FS-Z (SEQ ID NO: 2693), X-KAKTFKKRPQIATSN-C(Sx)-FS*-Z (SEQ ID NO: 2694), X-KAKTTKKRPQKATS*N-C(Sx)-FS-Z (SEQ ID NO: 2695), X-KAKTTKKRPQKATSN-C(Sx)-FS*-Z (SEQ ID NO: 2696), X-KAKTTKKRPQLATS*N-C(Sx)-FS-Z (SEQ ID NO: 2697), X-KAKTFKKRPQLATSN-C(Sx)-FS*-Z (SEQ ID NO: 2698), X-KAKTTKKRPQNATS*N-C(Sx)-FS-Z (SEQ ID NO: 2699), X-KAKTTKKRPQNATSN-C(Sx)-FS*-Z (SEQ ID NO: 2700), X-KAKTTKKRPQPATS*N-C(Sx)-FS-Z (SEQ ID NO: 2701), X-KAKTTKKRPQPATSN-C(Sx)-FS*-Z (SEQ ID NO: 2702); wherein X— is H or acetyl; and Z is OH or NH2.

[0139] In some embodiments, the metal-binding compound of the present invention is selected from the group consisting of: X-KAKTFKKRPQR[Nle]TS*N-C(Sx)-FS-Z (SEQ ID NO: 2703), X-KAKTFKKRPQR[Nle]TSN-C(Sx)-FS*-Z (SEQ ID NO: 2704), X-KAKTTKKRPQRA[Nle]S*N-C(Sx)-FS-Z (SEQ ID NO: 2705), X-KAKTTKKRPQRA[Nle]SN-C(Sx)-FS*-Z (SEQ ID NO: 2706), X-KAKTTKKRPQRADS*D-C(Sx)-FA-Z (SEQ ID NO: 2707), X-KAKTFKKRPQRADS*D-C(Sx)-FS-Z (SEQ ID NO: 2708), X-KAKTFKKRPQRADS*N-C(Sx)-FA-Z (SEQ ID NO: 2709), X-KAKTFKKRPQRADS*N-C(Sx)-FS-Z (SEQ ID NO: 2710), X-KAKTTKKRPQRADSD-C(Sx)-FS*-Z (SEQ ID NO: 2711), X-KAKTKKRPQRADSN-C(Sx)-FS*-Z (SEQ ID NO: 2712), X-KAKTTKKRPQRAES*D-C(Sx)-FA-Z (SEQ ID NO: 2713), X-KAKTFKKRPQRAES*D-C(Sx)-FS-Z (SEQ ID NO: 2714), X-KAKTTKKRPQRAES*N-C(Sx)-FA-Z (SEQ ID NO: 2715), X-KAKTTKKRPQRAES*N-C(Sx)-FS-Z (SEQ ID NO: 2716), X-KAKTFKKRPQRAESD-C(Sx)-FS*-Z (SEQ ID NO: 2717), X-KAKTFKKRPQRAESN-C(Sx)-FS*-Z (SEQ ID NO: 2718), X-KAKTTKKRPQRAFS*N-C(Sx)-FS-Z (SEQ ID NO: 2719), X-KAKTFKKRPQRAFSN-C(Sx)-FS*-Z (SEQ ID NO: 2720), X-KAKTTKKRPQRAGS*N-C(Sx)-FS-Z (SEQ ID NO: 2721), X-KAKTFKKRPQRAGSN-C(Sx)-FS*-Z (SEQ ID NO: 2722), X-KAKTTKKRPQRAHS*D-C(Sx)-FA-Z (SEQ ID NO: 2723), X-KAKTFKKRPQRAHS*D-C(Sx)-FS-Z (SEQ ID NO: 2724), X-KAKTFKKRPQRAHS*N-C(Sx)-FA-Z (SEQ ID NO: 2725), X-KAKTFKKRPQRAHS*N-C(Sx)-FS-Z (SEQ ID NO: 2726), X-KAKTTKKRPQRAHSD-C(Sx)-FS*-Z (SEQ ID NO: 2727), X-KAKTKKRPQRAHSN-C(Sx)-FS*-Z (SEQ ID NO: 2728), X-KAKTTKKRPQRAIS*N-C(Sx)-FS-Z (SEQ ID NO: 2729), X-KAKTTKKRPQRAISN-C(Sx)-FS*-Z (SEQ ID NO: 2730), X-KAKTTKKRPQRAKS*N-C(Sx)-FS-Z (SEQ ID NO: 2731), X-KAKTTKKRPQRAKSN-C(Sx)-FS*-Z (SEQ ID NO: 2732), X-KAKTTKKRPQRALS*N-C(Sx)-FS-Z (SEQ ID NO: 2733), X-KAKTTKKRPQRALSN-C(Sx)-FS*-Z (SEQ ID NO: 2734), X-KAKTTKKRPQRANS*N-C(Sx)-FS-Z (SEQ ID NO: 2735), X-KAKTTKKRPQRANSN-C(Sx)-FS*-Z (SEQ ID NO: 2736), X-KAKTTKKRPQRAPS*N-C(Sx)-FS-Z (SEQ ID NO: 2737), X-KAKTTKKRPQRAPSN-C(Sx)-FS*-Z (SEQ ID NO: 2738), X-KAKTTKKRPQRARS*N-C(Sx)-FS-Z (SEQ ID NO: 2739), X-KAKTTKKRPQRARSN-C(Sx)-FS*-Z (SEQ ID NO: 2740); wherein X— is H or acetyl; and Z is OH or NH2.

[0140] In some embodiments, the metal-binding compound of the present invention is selected from the group consisting of: X-KAKTTKKRPQRAT*S-C(Sx)-VFAMF-Z (SEQ ID NO: 2741), X-KAKTTKKRPQRAT*S-C(Sx)-VFS-Z (SEQ ID NO: 2742), X-KAKTTKKRPQRATS*[Nle]-C(Sx)-FS-Z (SEQ ID NO: 2743), X-KAKTTKKRPQRATS*D-C(Sx)-FA-Z (SEQ ID NO: 2744), X-KAKTTKKRPQRATS*D-C(Sx)-FS-Z (SEQ ID NO: 2745), X-KAKTTKKRPQRATS*E-C(Sx)-FS-Z (SEQ ID NO: 2746), X-KAKTTKKRPQRATS*F-C(Sx)-FS-Z (SEQ ID NO: 2747), X-KAKTTKKRPQRATS*G-C(Sx)-FS-Z (SEQ ID NO: 2748), X-KAKTTKKRPQRATS*H-C(Sx)-FS-Z (SEQ ID NO: 2749), X-KAKTTKKRPQRATS*I-C(Sx)-FS-Z (SEQ ID NO: 2750), X-KAKTTKKRPQRATS*K-C(Sx)-FS-Z (SEQ ID NO: 2751), X-KAKTTKKRPQRATS*L-C(Sx)-FS-Z (SEQ ID NO: 2752), X-KAKTTKKRPQRATS*N-C(Sx)-[Nle]S-Z (SEQ ID NO: 2753), X-KAKTTKKRPQRATS*N-C(Sx)-DS-Z (SEQ ID NO: 2754), X-KAKTTKKRPQRATS*N-C(Sx)-ES-Z (SEQ ID NO: 2755), X-KAKTTKKRPQRATS*N-C(Sx)-F[Nle]-Z (SEQ ID NO: 2756), X-KAKTTKKRPQRATS*N-C(Sx)-FA-Z (SEQ ID NO: 2757), X-KAKTTKKRPQRATS*N-C(Sx)-FD-Z (SEQ ID NO: 2758), X-KAKTTKKRPQRATS*N-C(Sx)-FE-Z (SEQ ID NO: 2759), X-KAKTTKKRPQRATS*N-C(Sx)-FF-Z (SEQ ID NO: 2760), X-KAKTTKKRPQRATS*N-C(Sx)-FG-Z (SEQ ID NO: 2761), X-KAKTTKKRPQRATS*N-C(Sx)-FH-Z (SEQ ID NO: 2762), X-KAKTTKKRPQRATS*N-C(Sx)-FI-Z (SEQ ID NO: 2763), X-KAKTTKKRPQRATS*N-C(Sx)-FK-Z (SEQ ID NO: 2764), X-KAKTTKKRPQRATS*N-C(Sx)-FL-Z (SEQ ID NO: 2765), X-KAKTTKKRPQRATS*N-C(Sx)-FN-Z (SEQ ID NO: 2766), X-KAKTTKKRPQRATS*N-C(Sx)-FP-Z (SEQ ID NO: 2767), X-KAKTTKKRPQRATS*N-C(Sx)-FR-Z (SEQ ID NO: 2768), X-KAKTTKKRPQRATS*N-C(Sx)-FS-Z (SEQ ID NO: 999), X-KAKTTKKRPQRATS*N-C(Sx)-FV-Z (SEQ ID NO: 2769), X-KAKTTKKRPQRATS*N-C(Sx)-FW-Z (SEQ ID NO: 2770), X-KAKTTKKRPQRATS*N-C(Sx)-F-Z (SEQ ID NO: 2771), X-KAKTTKKRPQRATS*N-C(Sx)-GS-Z (SEQ ID NO: 2772), X-KAKTTKKRPQRATS*N-C(Sx)-HS-Z (SEQ ID NO: 2773), X-KAKTTKKRPQRATS*N-C(Sx)-IS-Z (SEQ ID NO: 2774), X-KAKTTKKRPQRATS*N-C(Sx)-KS-Z (SEQ ID NO: 2775), X-KAKTTKKRPQRATS*N-C(Sx)-LS-Z (SEQ ID NO: 2776), X-KAKTTKKRPQRATS*N-C(Sx)-NS-Z (SEQ ID NO: 2777), X-KAKTTKKRPQRATS*N-C(Sx)-PS-Z (SEQ ID NO: 2778), X-KAKTTKKRPQRATS*N-C(Sx)-RS-Z (SEQ ID NO: 2779), X-KAKTTKKRPQRATS*N-C(Sx)-VS-Z (SEQ ID NO: 2780), X-KAKTTKKRPQRATS*N-C(Sx)-WS-Z (SEQ ID NO: 2781), X-KAKTTKKRPQRATS*P-C(Sx)-FS-Z (SEQ ID NO: 2782), X-KAKTTKKRPQRATS*R-C(Sx)-FS-Z (SEQ ID NO: 2783), X-KAKTTKKRPQRATS*V-C(Sx)-FS-Z (SEQ ID NO: 2784), X-KAKTTKKRPQRATS*W-C(Sx)-FS-Z (SEQ ID NO: 2785), X-KAKTTKKRPQRATS[Nle]-C(Sx)-FS*-Z (SEQ ID NO: 2786), X-KAKTTKKRPQRATSD-C(Sx)-FS*-Z (SEQ ID NO: 2787), X-KAKTTKKRPQRATSE-C(Sx)-FS*-Z (SEQ ID NO: 2788), X-KAKTTKKRPQRATSF-C(Sx)-FS*-Z (SEQ ID NO: 2789), X-KAKTTKKRPQRATSG-C(Sx)-FS*-Z (SEQ ID NO: 2790), X-KAKTTKKRPQRATSH-C(Sx)-FS*-Z (SEQ ID NO: 2791), X-KAKTTKKRPQRATSI-C(Sx)-FS*-Z (SEQ ID NO: 2792), X-KAKTTKKRPQRATSK-C(Sx)-FS*-Z (SEQ ID NO: 2793), X-KAKTTKKRPQRATSL-C(Sx)-FS*-Z (SEQ ID NO: 2794), X-KAKTTKKRPQRATSN-C(Sx)-DS*-Z (SEQ ID NO: 2795), X-KAKTTKKRPQRATSN-C(Sx)-ES*-Z (SEQ ID NO: 2796), X-KAKTTKKRPQRATSN-C(Sx)-FS*-Z (SEQ ID NO: 2797), X-KAKTTKKRPQRATSN-C(Sx)-GS*-Z (SEQ ID NO: 2798), X-KAKTTKKRPQRATSN-C(Sx)-HS*-Z (SEQ ID NO: 2799), X-KAKTTKKRPQRATSN-C(Sx)-IS*-Z (SEQ ID NO: 2800), X-KAKTKKRPQRATSN-C(Sx)-KS*-Z (SEQ ID NO: 2801), X-KAKTTKKRPQRATSN-C(Sx)-LS*-Z (SEQ ID NO: 2802), X-KAKTTKKRPQRATSN-C(Sx)-NS*-Z (SEQ ID NO: 2803), X-KAKTTKKRPQRATSN-C(Sx)-PS*-Z (SEQ ID NO: 2804), X-KAKTKKRPQRATSN-C(Sx)-RS*-Z (SEQ ID NO: 2805), X-KAKTTKKRPQRATSN-C(Sx)-VS*-Z (SEQ ID NO: 2806), X-KAKTTKKRPQRATSN-C(Sx)-WS*-Z (SEQ ID NO: 2807), X-KAKTTKKRPQRATSP-C(Sx)-FS*-Z (SEQ ID NO: 2808), X-KAKTTKKRPQRATSR-C(Sx)-FS*-Z (SEQ ID NO: 2809), X-KAKTTKKRPQRATSV-C(Sx)-FS*-Z (SEQ ID NO: 2810), X-KAKTTKKRPQRATSW-C(Sx)-FS*-Z (SEQ ID NO: 2811), X-KAKTTKKRPQRAVS*N-C(Sx)-FS-Z (SEQ ID NO: 2812), X-KAKTITKKRPQRAVSN-C(Sx)-FS*-Z (SEQ ID NO: 2813), X-KAKTTKKRPQRAWS*N-C(Sx)-FS-Z (SEQ ID NO: 2814), X-KAKTTKKRPQRAWSN-C(Sx)-FS*-Z (SEQ ID NO: 2815), X-KAKTTKKRPQRDTS*N-C(Sx)-FS-Z (SEQ ID NO: 2816), X-KAKTTKKRPQRDTSN-C(Sx)-FS*-Z (SEQ ID NO: 2817), X-KAKTTKKRPQRETS*N-C(Sx)-FS-Z (SEQ ID NO: 2818), X-KAKTTKKRPQRETSN-C(Sx)-FS*-Z (SEQ ID NO: 2819), and X-KAKTTKKRPQRFTS*N-C(Sx)-FS-Z (SEQ ID NO: 2820); wherein X is H or acetyl; and Z is OH or NH2.

[0141] In some embodiments, the metal-binding compound of the present invention is selected from the group consisting of: X-KAKTTKKRPQRFTSN-C(Sx)-FS*-Z (SEQ ID NO: 2821), X-KAKTTKKRPQRGTS*N-C(Sx)-FS-Z (SEQ ID NO: 2822), X-KAKTIKKRPQRGTSN-C(Sx)-FS*-Z (SEQ ID NO: 2823), X-KAKTTKKRPQRHTS*N-C(Sx)-FS-Z (SEQ ID NO: 2824), X-KAKTIKKRPQRHTSN-C(Sx)-FS*-Z (SEQ ID NO: 2825), X-KAKTTKKRPQRITS*N-C(Sx)-FS-Z (SEQ ID NO: 2826), X-KAKTTKKRPQRITSN-C(Sx)-FS*-Z (SEQ ID NO: 2827), X-KAKTTKKRPQRKTS*N-C(Sx)-FS-Z (SEQ ID NO: 2828), X-KAKTIKKRPQRKTSN-C(Sx)-FS*-Z (SEQ ID NO: 2829), X-KAKTTKKRPQRLTS*N-C(Sx)-FS-Z (SEQ ID NO: 2830), X-KAKTTKKRPQRLTSN-C(Sx)-FS*-Z (SEQ ID NO: 2831), X-KAKTTKKRPQRNTS*N-C(Sx)-FS-Z (SEQ ID NO: 2832), X-KAKTIKKRPQRNTSN-C(Sx)-FS*-Z (SEQ ID NO: 2833), X-KAKTTKKRPQRPTS*N-C(Sx)-FS-Z (SEQ ID NO: 2834), X-KAKTTKKRPQRPTSN-C(Sx)-FS*-Z (SEQ ID NO: 2835), X-KAKTTKKRPQRRTS*N-C(Sx)-FS-Z (SEQ ID NO: 2836), X-KAKTIKKRPQRRTSN-C(Sx)-FS*-Z (SEQ ID NO: 2837), X-KAKTTKKRPQRVTS*N-C(Sx)-FS-Z (SEQ ID NO: 2838), X-KAKTTKKRPQRVTSN-C(Sx)-FS*-Z (SEQ ID NO: 2839), X-KAKTTKKRPQRWTS*N-C(Sx)-FS-Z (SEQ ID NO: 2840), X-KAKTTKKRPQRWTSN-C(Sx)-FS*-Z (SEQ ID NO: 2841), X-KAKTTKKRPQVATS*N-C(Sx)-FS-Z (SEQ ID NO: 2842), X-KAKTTKKRPQVATSN-C(Sx)-FS*-Z (SEQ ID NO: 2843), X-KAKTTKKRPQWATS*N-C(Sx)-FS-Z (SEQ ID NO: 2844), X-KAKTTKKRPQWATSN-C(Sx)-FS*-Z (SEQ ID NO: 2845), X-KAKTTKKRPRRATS*N-C(Sx)-FS-Z (SEQ ID NO: 2846), X-KAKTITKKRPRRATSN-C(Sx)-FS*-Z (SEQ ID NO: 2847), X-KAKTTKKRPVRATS*N-C(Sx)-FS-Z (SEQ ID NO: 2848), X-KAKTIKKRPVRATSN-C(Sx)-FS*-Z (SEQ ID NO: 2849), X-KAKTTKKRPWRATS*N-C(Sx)-FS-Z (SEQ ID NO: 2850), X-KAKTTKKRPWRATSN-C(Sx)-FS*-Z (SEQ ID NO: 2851), X-KAKTTKKRRQRATS*N-C(Sx)-FS-Z (SEQ ID NO: 2852), X-KAKTTKKRRQRATSN-C(Sx)-FS*-Z (SEQ ID NO: 2853), X-KAKTTKKRVQRATS*N-C(Sx)-FS-Z (SEQ ID NO: 2854), X-KAKTKKRVQRATSN-C(Sx)-FS*-Z (SEQ ID NO: 2855), X-KAKTTKKRWQRATS*N-C(Sx)-FS-Z (SEQ ID NO: 2856), X-KAKTTKKRWQRATSN-C(Sx)-FS*-Z (SEQ ID NO: 2857), X-KAKTTKKVPQRATS*N-C(Sx)-FS-Z (SEQ ID NO: 2858), X-KAKTTKKVPQRATSN-C(Sx)-FS*-Z (SEQ ID NO: 2859), X-KAKTTKKWPQRATS*N-C(Sx)-FS-Z (SEQ ID NO: 2860), X-KAKTTKKWPQRATSN-C(Sx)-FS*-Z (SEQ ID NO: 2861), X-KAKTTKLRPQRATS*N-C(Sx)-FS-Z (SEQ ID NO: 2862), X-KAKTTKLRPQRATSN-C(Sx)-FS*-Z (SEQ ID NO: 2863), X-KAKTTKNRPQRATS*N-C(Sx)-FS-Z (SEQ ID NO: 2864), X-KAKTTKNRPQRATSN-C(Sx)-FS*-Z (SEQ ID NO: 2865), X-KAKTTKPRPQRATS*N-C(Sx)-FS-Z (SEQ ID NO: 2866), X-KAKTTKPRPQRATSN-C(Sx)-FS*-Z (SEQ ID NO: 2867), X-KAKTTKRRPQRATS*N-C(Sx)-FS-Z (SEQ ID NO: 2868), X-KAKTTKRRPQRATSN-C(Sx)-FS*-Z (SEQ ID NO: 2869), X-KAKTTKVRPQRATS*N-C(Sx)-FS-Z (SEQ ID NO: 2870), X-KAKTTKVRPQRATSN-C(Sx)-FS*-Z (SEQ ID NO: 2871), X-KAKTTKWRPQRATS*N-C(Sx)-FS-Z (SEQ ID NO: 2872), X-KAKTTKWRPQRATSN-C(Sx)-FS*-Z (SEQ ID NO: 2873), X-KAKTTLKRPQRATS*N-C(Sx)-FS-Z (SEQ ID NO: 2874), X-KAKTITLKRPQRATSN-C(Sx)-FS*-Z (SEQ ID NO: 2875), X-KAKTTNKRPQRATS*N-C(Sx)-FS-Z (SEQ ID NO: 2876), X-KAKTTNKRPQRATSN-C(Sx)-FS*-Z (SEQ ID NO: 2877), X-KAKTTPKRPQRATS*N-C(Sx)-FS-Z (SEQ ID NO: 2878), X-KAKTITPKRPQRATSN-C(Sx)-FS*-Z (SEQ ID NO: 2879), X-KAKTTRKRPQRATS*N-C(Sx)-FS-Z (SEQ ID NO: 2880), X-KAKTTRKRPQRATSN-C(Sx)-FS*-Z (SEQ ID NO: 2881), X-KAKTTVKRPQRATS*N-C(Sx)-FS-Z (SEQ ID NO: 2882), X-KAKTTVKRPQRATSN-C(Sx)-FS*-Z (SEQ ID NO: 2883), X-KAKTTWKRPQRATS*N-C(Sx)-FS-Z (SEQ ID NO: 2884), X-KAKTTWKRPQRATSN-C(Sx)-FS*-Z (SEQ ID NO: 2885); wherein X— is H or acetyl; and Z is OH or NH2.

[0142] In some embodiments, the metal-binding compound of the present invention is selected from the group consisting of: X-KAKTVKKRPQRADS*D-C(Sx)-FA-Z (SEQ ID NO: 2886), X-KAKTVKKRPQRADS*D-C(Sx)-FS-Z (SEQ ID NO: 2887), X-KAKTVKKRPQRADS*N-C(Sx)-FA-Z (SEQ ID NO: 2888), X-KAKTVKKRPQRADS*N-C(Sx)-FS-Z (SEQ ID NO: 2889), X-KAKTVKKRPQRADSD-C(Sx)-FS*-Z (SEQ ID NO: 2890), X-KAKTVKKRPQRADSN-C(Sx)-FS*-Z (SEQ ID NO: 2891), X-KAKTVKKRPQRAES*D-C(Sx)-FA-Z (SEQ ID NO: 2892), X-KAKTVKKRPQRAES*D-C(Sx)-FS-Z (SEQ ID NO: 2893), X-KAKTVKKRPQRAES*N-C(Sx)-FA-Z (SEQ ID NO: 2894), X-KAKTVKKRPQRAES*N-C(Sx)-FS-Z (SEQ ID NO: 2895), X-KAKTVKKRPQRAESD-C(Sx)-FS*-Z (SEQ ID NO: 2896), X-KAKTVKKRPQRAESN-C(Sx)-FS*-Z (SEQ ID NO: 2897), X-KAKTVKKRPQRAHS*D-C(Sx)-FA-Z (SEQ ID NO: 2898), X-KAKTVKKRPQRAHS*D-C(Sx)-FS-Z (SEQ ID NO: 2899), X-KAKTVKKRPQRAHS*N-C(Sx)-FA-Z (SEQ ID NO: 2900), X-KAKTVKKRPQRAHS*N-C(Sx)-FS-Z (SEQ ID NO: 2901), X-KAKTVKKRPQRAHSD-C(Sx)-FS*-Z (SEQ ID NO: 2902), X-KAKTVKKRPQRAHSN-C(Sx)-FS*-Z (SEQ ID NO: 2903), X-KAKTVKKRPQRATS*D-C(Sx)-FA-Z (SEQ ID NO: 2904), X-KAKTVKKRPQRATS*D-C(Sx)-FS-Z (SEQ ID NO: 2905), X-KAKTVKKRPQRATS*N-C(Sx)-FA-Z (SEQ ID NO: 2906), X-KAKTVKKRPQRATS*N-C(Sx)-FS-Z (SEQ ID NO: 2907), X-KAKTVKKRPQRATSD-C(Sx)-FS*-Z (SEQ ID NO: 2908), X-KAKTVKKRPQRATSN-C(Sx)-FS*-Z (SEQ ID NO: 2909), X-KAKTWKKRPQRATS*N-C(Sx)-FS-Z (SEQ ID NO: 2910), X-KAKTWKKRPQRATSN-C(Sx)-FS*-Z (SEQ ID NO: 2911), X-KAKVTKKRPQRATS*N-C(Sx)-FS-Z (SEQ ID NO: 2912), X-KAKVTKKRPQRATSN-C(Sx)-FS*-Z (SEQ ID NO: 2913), X-KAKWTKKRPQRATS*N-C(Sx)-FS-Z (SEQ ID NO: 2914), X-KAKWTKKRPQRATSN-C(Sx)-FS*-Z (SEQ ID NO: 2915), X-KALTTKKRPQRATS*N-C(Sx)-FS-Z (SEQ ID NO: 2916), X-KALTKKRPQRATSN-C(Sx)-FS*-Z (SEQ ID NO: 2917), X-KANPLMA-C(Sx)-GT*LTRRHQNGRF-Z (SEQ ID NO: 2918), X-KANTTKKRPQRATS*N-C(Sx)-FS-Z (SEQ ID NO: 2919), X-KANTTKKRPQRATSN-C(Sx)-FS*-Z (SEQ ID NO: 2920), X-KAPTTKKRPQRATS*N-C(Sx)-FS-Z (SEQ ID NO: 2921), X-KAPTTKKRPQRATSN-C(Sx)-FS*-Z (SEQ ID NO: 2922), X-KARTTKKRPQRATS*N-C(Sx)-FS-Z (SEQ ID NO: 2923), X-KARTTKKRPQRATSN-C(Sx)-FS*-Z (SEQ ID NO: 2924), X-KAVTTKKRPQRATS*N-C(Sx)-FS-Z (SEQ ID NO: 2925), X-KAVTTKKRPQRATSN-C(Sx)-FS*-Z (SEQ ID NO: 2926), X-KAWTTKKRPQRATS*N-C(Sx)-FS-Z (SEQ ID NO: 2927), X-KAWTTKKRPQRATSN-C(Sx)-FS*-Z (SEQ ID NO: 2928), X-K-C(Sx)-DS*LRRKAK-Z (SEQ ID NO: 2929), X-K-C(Sx)-HS*LPRGNK-Z (SEQ ID NO: 2930), X-K-C(Sx)-LS*PGPF-Z (SEQ ID NO: 2931), X-KDEIL-C(Sx)-TT*PISEQKG-Z (SEQ ID NO: 1086), X-KDEILPTT*P-C(Sx)-SEQKG-Z (SEQ ID NO: 1085), X-KDKTFKKRPQRATS*N-C(Sx)-FS-Z (SEQ ID NO: 2932), X-KDKTFKKRPQRATSN-C(Sx)-FS*-Z (SEQ ID NO: 2933), X-KDRPQRAT*S-C(Sx)-VFAMF-Z (SEQ ID NO: 2934), X-KEEQSQIT*S-C(Sx)-VTGQIGWR-Z (SEQ ID NO: 2935), X-KEEQSQITS-C(Sx)-VT*GQIGWR-Z (SEQ ID NO: 2936), X-KEEQSQITSQVT*G-C(Sx)-IGWR-Z (SEQ ID NO: 2937), X-KEEQSQITSQVT*GQ-C(Sx)-GWR-Z (SEQ ID NO: 2938), X-KEHRG-C(Sx)-DS*PDPDTSY-Z (SEQ ID NO: 1147), X-KEKKAVSPL-C(Sx)-LT*TTNSSEG-Z (SEQ ID NO: 2939), X-KEKKAVSPLL-C(Sx)-TT*TNSSEG-Z (SEQ ID NO: 2940), X-KEKKAVSPLLL-C(Sx)-TI*NSSEG-Z (SEQ ID NO: 2941), X-KEKKAVSPLLLT*T-C(Sx)-NSSEG-Z (SEQ ID NO: 2942), X-KEKKAVSPLLLT*T-C(Sx)-SSEG-Z (SEQ ID NO: 2943), and X-KEKKAVSPLLLTI-C(Sx)-NS*SEG-Z (SEQ ID NO: 2944); wherein X is H or acetyl; and Z is OH or NH2.

[0143] In some embodiments, the metal-binding compound of the present invention is selected from the group consisting of: X-KEKKAVSPLLLTIT*N-C(Sx)-SEG-Z (SEQ ID NO: 2945), X-KEKKAVSPLLLTIT-C(Sx)-SS*EG-Z (SEQ ID NO: 2946), X-KEKTTKKRPQRATS*N-C(Sx)-FS-Z (SEQ ID NO: 2947), X-KEKTTKKRPQRATSN-C(Sx)-FS*-Z (SEQ ID NO: 2948), X-KERPQRAT*S-C(Sx)-VFAMF-Z (SEQ ID NO: 2949), X-KEVPRRKS*L-C(Sx)-GTPYW[Nle]APE-Z (SEQ ID NO: 2950), X-KEVPRRKSL-C(Sx)-GT*PYW[Nle]APE-Z (SEQ ID NO: 2951), X-KF-C(Sx)-KT*FKWM-Z (SEQ ID NO: 2952), X-KFFKT*F-C(Sx)-WM-Z (SEQ ID NO: 2953), X-KFKTTKKRPQRATS*N-C(Sx)-FS-Z (SEQ ID NO: 2954), X-KFKTTKKRPQRATSN-C(Sx)-FS*-Z (SEQ ID NO: 2955), X-KFRPQRAT*S-C(Sx)-VFAMF-Z (SEQ ID NO: 2956), X-KGKKKKKRPQRADS*D-C(Sx)-FA-Z (SEQ ID NO: 2957), X-KGKKKKKRPQRADS*D-C(Sx)-FS-Z (SEQ ID NO: 2958), X-KGKKKKKRPQRADS*N-C(Sx)-FA-Z (SEQ ID NO: 2959), X-KGKKKKKRPQRADS*N-C(Sx)-FS-Z (SEQ ID NO: 2960), X-KGKKKKKRPQRADSD-C(Sx)-FS*-Z (SEQ ID NO: 2961), X-KGKKKKKRPQRADSN-C(Sx)-FS*-Z (SEQ ID NO: 2962), X-KGKKKKKRPQRAES*D-C(Sx)-FA-Z (SEQ ID NO: 2963), X-KGKKKKKRPQRAES*D-C(Sx)-FS-Z (SEQ ID NO: 2964), X-KGKKKKKRPQRAES*N-C(Sx)-FA-Z (SEQ ID NO: 2965), X-KGKKKKKRPQRAES*N-C(Sx)-FS-Z (SEQ ID NO: 2966), X-KGKKKKKRPQRAESD-C(Sx)-FS*-Z (SEQ ID NO: 2967), X-KGKKKKKRPQRAESN-C(Sx)-FS*-Z (SEQ ID NO: 2968), X-KGKKKKKRPQRAHS*D-C(Sx)-FA-Z (SEQ ID NO: 2969), X-KGKKKKKRPQRAHS*D-C(Sx)-FS-Z (SEQ ID NO: 2970), X-KGKKKKKRPQRAHS*N-C(Sx)-FA-Z (SEQ ID NO: 2971), X-KGKKKKKRPQRAHS*N-C(Sx)-FS-Z (SEQ ID NO: 2972), X-KGKKKKKRPQRAHSD-C(Sx)-FS*-Z (SEQ ID NO: 2973), X-KGKKKKKRPQRAHSN-C(Sx)-FS*-Z (SEQ ID NO: 2974), X-KGKKKKKRPQRATS*D-C(Sx)-FA-Z (SEQ ID NO: 2975), X-KGKKKKKRPQRATS*D-C(Sx)-FS-Z (SEQ ID NO: 2976), X-KGKKKKKRPQRATS*N-C(Sx)-FA-Z (SEQ ID NO: 2977), X-KGKKKKKRPQRATS*N-C(Sx)-FS-Z (SEQ ID NO: 2978), X-KGKKKKKRPQRATSD-C(Sx)-FS*-Z (SEQ ID NO: 2979), X-KGKKKKKRPQRATSN-C(Sx)-FS*-Z (SEQ ID NO: 2980), X-KGKKRKKRPQRADS*D-C(Sx)-FA-Z (SEQ ID NO: 2981), X-KGKKRKKRPQRADS*D-C(Sx)-FS-Z (SEQ ID NO: 2982), X-KGKKRKKRPQRADS*N-C(Sx)-FA-Z (SEQ ID NO: 2983), X-KGKKRKKRPQRADS*N-C(Sx)-FS-Z (SEQ ID NO: 2984), X-KGKKRKKRPQRADSD-C(Sx)-FS*-Z (SEQ ID NO: 2985), X-KGKKRKKRPQRADSN-C(Sx)-FS*-Z (SEQ ID NO: 2986), and X-KGKKRKKRPQRAES*D-C(Sx)-FA-Z (SEQ ID NO: 2987); wherein X is H or acetyl; and Z is OH or NH2.

[0144] In some embodiments, the metal-binding compound of the present invention is selected from the group consisting of: X-KGKKRKKRPQRAES*D-C(Sx)-FS-Z (SEQ ID NO: 2988), X-KGKKRKKRPQRAES*N-C(Sx)-FA-Z (SEQ ID NO: 2989), X-KGKKRKKRPQRAES*N-C(Sx)-FS-Z (SEQ ID NO: 2990), X-KGKKRKKRPQRAESD-C(Sx)-FS*-Z (SEQ ID NO: 2991), X-KGKKRKKRPQRAESN-C(Sx)-FS*-Z (SEQ ID NO: 2992), X-KGKKRKKRPQRAHS*D-C(Sx)-FA-Z (SEQ ID NO: 2993), X-KGKKRKKRPQRAHS*D-C(Sx)-FS-Z (SEQ ID NO: 2994), X-KGKKRKKRPQRAHS*N-C(Sx)-FA-Z (SEQ ID NO: 2995), X-KGKKRKKRPQRAHS*N-C(Sx)-FS-Z (SEQ ID NO: 2996), X-KGKKRKKRPQRAHSD-C(Sx)-FS*-Z (SEQ ID NO: 2997), X-KGKKRKKRPQRAHSN-C(Sx)-FS*-Z (SEQ ID NO: 2998), X-KGKKRKKRPQRATS*D-C(Sx)-FA-Z (SEQ ID NO: 2999), X-KGKKRKKRPQRATS*D-C(Sx)-FS-Z (SEQ ID NO: 3000), X-KGKKRKKRPQRATS*N-C(Sx)-FA-Z (SEQ ID NO: 3001), X-KGKKRKKRPQRATS*N-C(Sx)-FS-Z (SEQ ID NO: 3002), X-KGKKRKKRPQRATSD-C(Sx)-FS*-Z (SEQ ID NO: 3003), X-KGKKRKKRPQRATSN-C(Sx)-FS*-Z (SEQ ID NO: 3004), X-KGKKTKKRPQRADS*D-C(Sx)-FA-Z (SEQ ID NO: 3005), X-KGKKTKKRPQRADS*D-C(Sx)-FS-Z (SEQ ID NO: 3006), X-KGKKTKKRPQRADS*N-C(Sx)-FA-Z (SEQ ID NO: 3007), X-KGKKTKKRPQRADS*N-C(Sx)-FS-Z (SEQ ID NO: 3008), X-KGKKTKKRPQRADSD-C(Sx)-FS*-Z (SEQ ID NO: 3009), X-KGKKTKKRPQRADSN-C(Sx)-FS*-Z (SEQ ID NO: 3010), X-KGKKTKKRPQRAES*D-C(Sx)-FA-Z (SEQ ID NO: 3011), X-KGKKTKKRPQRAES*D-C(Sx)-FS-Z (SEQ ID NO: 3012), X-KGKKTKKRPQRAES*N-C(Sx)-FA-Z (SEQ ID NO: 3013), X-KGKKTKKRPQRAES*N-C(Sx)-FS-Z (SEQ ID NO: 3014), X-KGKKTKKRPQRAESD-C(Sx)-FS*-Z (SEQ ID NO: 3015), X-KGKKTKKRPQRAESN-C(Sx)-FS*-Z (SEQ ID NO: 3016), X-KGKKTKKRPQRAHS*D-C(Sx)-FA-Z (SEQ ID NO: 3017), X-KGKKTKKRPQRAHS*D-C(Sx)-FS-Z (SEQ ID NO: 3018), X-KGKKTKKRPQRAHS*N-C(Sx)-FA-Z (SEQ ID NO: 3019), X-KGKKTKKRPQRAHS*N-C(Sx)-FS-Z (SEQ ID NO: 3020), X-KGKKTKKRPQRAHSD-C(Sx)-FS*-Z (SEQ ID NO: 3021), X-KGKKTKKRPQRAHSN-C(Sx)-FS*-Z (SEQ ID NO: 3022), X-KGKKTKKRPQRATS*D-C(Sx)-FA-Z (SEQ ID NO: 3023), X-KGKKTKKRPQRATS*D-C(Sx)-FS-Z (SEQ ID NO: 3024), X-KGKKTKKRPQRATS*N-C(Sx)-FA-Z (SEQ ID NO: 3025), X-KGKKTKKRPQRATS*N-C(Sx)-FS-Z (SEQ ID NO: 3026), X-KGKKTKKRPQRATSD-C(Sx)-FS*-Z (SEQ ID NO: 3027), X-KGKKTKKRPQRATSN-C(Sx)-FS*-Z (SEQ ID NO: 3028), X-KGKKVKKRPQRADS*D-C(Sx)-FA-Z (SEQ ID NO: 3029), X-KGKKVKKRPQRADS*D-C(Sx)-FS-Z (SEQ ID NO: 3030), X-KGKKVKKRPQRADS*N-C(Sx)-FA-Z (SEQ ID NO: 3031), X-KGKKVKKRPQRADS*N-C(Sx)-FS-Z (SEQ ID NO: 3032), X-KGKKVKKRPQRADSD-C(Sx)-FS*-Z (SEQ ID NO: 3033), X-KGKKVKKRPQRADSN-C(Sx)-FS*-Z (SEQ ID NO: 3034), X-KGKKVKKRPQRAES*D-C(Sx)-FA-Z (SEQ ID NO: 3035), X-KGKKVKKRPQRAES*D-C(Sx)-FS-Z (SEQ ID NO: 3036), X-KGKKVKKRPQRAES*N-C(Sx)-FA-Z (SEQ ID NO: 3037), X-KGKKVKKRPQRAES*N-C(Sx)-FS-Z (SEQ ID NO: 3038), X-KGKKVKKRPQRAESD-C(Sx)-FS*-Z (SEQ ID NO: 3039), X-KGKKVKKRPQRAESN-C(Sx)-FS*-Z (SEQ ID NO: 3040), X-KGKKVKKRPQRAHS*D-C(Sx)-FA-Z (SEQ ID NO: 3041), X-KGKKVKKRPQRAHS*D-C(Sx)-FS-Z (SEQ ID NO: 3042), X-KGKKVKKRPQRAHS*N-C(Sx)-FA-Z (SEQ ID NO: 3043), X-KGKKVKKRPQRAHS*N-C(Sx)-FS-Z (SEQ ID NO: 3044), and X-KGKKVKKRPQRAHSD-C(Sx)-FS*-Z (SEQ ID NO: 3045); wherein X is H or acetyl; and Z is OH or NH2.

[0145] In some embodiments, the metal-binding compound of the present invention is selected from the group consisting of: X-KGKKVKKRPQRAHSN-C(Sx)-FS*-Z (SEQ ID NO: 3046), X-KGKKVKKRPQRATS*D-C(Sx)-FA-Z (SEQ ID NO: 3047), X-KGKKVKKRPQRATS*D-C(Sx)-FS-Z (SEQ ID NO: 3048), X-KGKKVKKRPQRATS*N-C(Sx)-FA-Z (SEQ ID NO: 3049), X-KGKKVKKRPQRATS*N-C(Sx)-FS-Z (SEQ ID NO: 3050), X-KGKKVKKRPQRATSD-C(Sx)-FS*-Z (SEQ ID NO: 3051), X-KGKKVKKRPQRATSN-C(Sx)-FS*-Z (SEQ ID NO: 3052), X-KGKTKKKRPQRADS*D-C(Sx)-FA-Z (SEQ ID NO: 3053), X-KGKTKKKRPQRADS*D-C(Sx)-FS-Z (SEQ ID NO: 3054), X-KGKTKKKRPQRADS*N-C(Sx)-FA-Z (SEQ ID NO: 3055), X-KGKTKKKRPQRADS*N-C(Sx)-FS-Z (SEQ ID NO: 3056), X-KGKTKKKRPQRADSD-C(Sx)-FS*-Z (SEQ ID NO: 3057), X-KGKTKKKRPQRADSN-C(Sx)-FS*-Z (SEQ ID NO: 3058), X-KGKTKKKRPQRAES*D-C(Sx)-FA-Z (SEQ ID NO: 3059), X-KGKTKKKRPQRAES*D-C(Sx)-FS-Z (SEQ ID NO: 3060), X-KGKTKKKRPQRAES*N-C(Sx)-FA-Z (SEQ ID NO: 3061), X-KGKTKKKRPQRAES*N-C(Sx)-FS-Z (SEQ ID NO: 3062), X-KGKTKKKRPQRAESD-C(Sx)-FS*-Z (SEQ ID NO: 3063), X-KGKTKKKRPQRAESN-C(Sx)-FS*-Z (SEQ ID NO: 3064), X-KGKTKKKRPQRAHS*D-C(Sx)-FA-Z (SEQ ID NO: 3065), X-KGKTKKKRPQRAHS*D-C(Sx)-FS-Z (SEQ ID NO: 3066), X-KGKTKKKRPQRAHS*N-C(Sx)-FA-Z (SEQ ID NO: 3067), X-KGKTKKKRPQRAHS*N-C(Sx)-FS-Z (SEQ ID NO: 3068), X-KGKTKKKRPQRAHSD-C(Sx)-FS*-Z (SEQ ID NO: 3069), X-KGKTKKKRPQRAHSN-C(Sx)-FS*-Z (SEQ ID NO: 3070), X-KGKTKKKRPQRATS*D-C(Sx)-FA-Z (SEQ ID NO: 3071), X-KGKTKKKRPQRATS*D-C(Sx)-FS-Z (SEQ ID NO: 3072), X-KGKTKKKRPQRATS*N-C(Sx)-FA-Z (SEQ ID NO: 3073), X-KGKTKKKRPQRATS*N-C(Sx)-FS-Z (SEQ ID NO: 3074), X-KGKTKKKRPQRATSD-C(Sx)-FS*-Z (SEQ ID NO: 3075), X-KGKTKKKRPQRATSN-C(Sx)-FS*-Z (SEQ ID NO: 3076), X-KGKTRKKRPQRADS*D-C(Sx)-FA-Z (SEQ ID NO: 3077), X-KGKTRKKRPQRADS*D-C(Sx)-FS-Z (SEQ ID NO: 3078), X-KGKTRKKRPQRADS*N-C(Sx)-FA-Z (SEQ ID NO: 3079), X-KGKTRKKRPQRADS*N-C(Sx)-FS-Z (SEQ ID NO: 3080), X-KGKTRKKRPQRADSD-C(Sx)-FS*-Z (SEQ ID NO: 3081), X-KGKTRKKRPQRADSN-C(Sx)-FS*-Z (SEQ ID NO: 3082), X-KGKTRKKRPQRAES*D-C(Sx)-FA-Z (SEQ ID NO: 3083), X-KGKTRKKRPQRAES*D-C(Sx)-FS-Z (SEQ ID NO: 3084), X-KGKTRKKRPQRAES*N-C(Sx)-FA-Z (SEQ ID NO: 3085), X-KGKTRKKRPQRAES*N-C(Sx)-FS-Z (SEQ ID NO: 3086), X-KGKTRKKRPQRAESD-C(Sx)-FS*-Z (SEQ ID NO: 3087), X-KGKTRKKRPQRAESN-C(Sx)-FS*-Z (SEQ ID NO: 3088), X-KGKTRKKRPQRAHS*D-C(Sx)-FA-Z (SEQ ID NO: 3089), X-KGKTRKKRPQRAHS*D-C(Sx)-FS-Z (SEQ ID NO: 3090), X-KGKTRKKRPQRAHS*N-C(Sx)-FA-Z (SEQ ID NO: 3091), X-KGKTRKKRPQRAHS*N-C(Sx)-FS-Z (SEQ ID NO: 3092), X-KGKTRKKRPQRAHSD-C(Sx)-FS*-Z (SEQ ID NO: 3093), X-KGKTRKKRPQRAHSN-C(Sx)-FS*-Z (SEQ ID NO: 3094), X-KGKTRKKRPQRATS*D-C(Sx)-FA-Z (SEQ ID NO: 3095), X-KGKTRKKRPQRATS*D-C(Sx)-FS-Z (SEQ ID NO: 3096), X-KGKTRKKRPQRATS*N-C(Sx)-FA-Z (SEQ ID NO: 3097), X-KGKTRKKRPQRATS*N-C(Sx)-FS-Z (SEQ ID NO: 3098), X-KGKTRKKRPQRATSD-C(Sx)-FS*-Z (SEQ ID NO: 3099), X-KGKTRKKRPQRATSN-C(Sx)-FS*-Z (SEQ ID NO: 3100), X-KGKTITKKRPQRADS*D-C(Sx)-FA-Z (SEQ ID NO: 3101), X-KGKTTKKRPQRADS*D-C(Sx)-FS-Z (SEQ ID NO: 3102), and X-KGKTTKKRPQRADS*N-C(Sx)-FA-Z (SEQ ID NO: 3103); wherein X is H or acetyl; and Z is OH or NH2.

[0146] In some embodiments, the metal-binding compound of the present invention is selected from the group consisting of: X-KGKTTKKRPQRADS*N-C(Sx)-FS-Z (SEQ ID NO: 3104), X-KGKTTKKRPQRADSD-C(Sx)-FS*-Z (SEQ ID NO: 3105), X-KGKTTKKRPQRADSN-C(Sx)-FS*-Z (SEQ ID NO: 3106), X-KGKTTKKRPQRAES*D-C(Sx)-FA-Z (SEQ ID NO: 3107), X-KGKTVKKRPQRAES*D-C(Sx)-FS-Z (SEQ ID NO: 3108), X-KGKTTKKRPQRAES*N-C(Sx)-FA-Z (SEQ ID NO: 3109), X-KGKTTKKRPQRAES*N-C(Sx)-FS-Z (SEQ ID NO: 3110), X-KGKTFKKRPQRAESD-C(Sx)-FS*-Z (SEQ ID NO: 3111), X-KGKTFKKRPQRAESN-C(Sx)-FS*-Z (SEQ ID NO: 3112), X-KGKTTKKRPQRAHS*D-C(Sx)-FA-Z (SEQ ID NO: 3113), X-KGKTKKRPQRAHS*D-C(Sx)-FS-Z (SEQ ID NO: 3114), X-KGKTVKKRPQRAHS*N-C(Sx)-FA-Z (SEQ ID NO: 3115), X-KGKTVKKRPQRAHS*N-C(Sx)-FS-Z (SEQ ID NO: 3116), X-KGKTTKKRPQRAHSD-C(Sx)-FS*-Z (SEQ ID NO: 3117), X-KGKTKKRPQRAHSN-C(Sx)-FS*-Z (SEQ ID NO: 3118), X-KGKTTKKRPQRATS*D-C(Sx)-FA-Z (SEQ ID NO: 3119), X-KGKTVKKRPQRATS*D-C(Sx)-FS-Z (SEQ ID NO: 3120), X-KGKTTKKRPQRATS*N-C(Sx)-FA-Z (SEQ ID NO: 3121), X-KGKTTKKRPQRATS*N-C(Sx)-FS-Z (SEQ ID NO: 3122), X-KGKTFKKRPQRATSD-C(Sx)-FS*-Z (SEQ ID NO: 3123), X-KGKTFKKRPQRATSN-C(Sx)-FS*-Z (SEQ ID NO: 3124), X-KGKTVKKRPQRADS*D-C(Sx)-FA-Z (SEQ ID NO: 3125), X-KGKTVKKRPQRADS*D-C(Sx)-FS-Z (SEQ ID NO: 3126), X-KGKTVKKRPQRADS*N-C(Sx)-FA-Z (SEQ ID NO: 3127), X-KGKTVKKRPQRADS*N-C(Sx)-FS-Z (SEQ ID NO: 3128), X-KGKTVKKRPQRADSD-C(Sx)-FS*-Z (SEQ ID NO: 3129), X-KGKTVKKRPQRADSN-C(Sx)-FS*-Z (SEQ ID NO: 3130), X-KGKTVKKRPQRAES*D-C(Sx)-FA-Z (SEQ ID NO: 3131), X-KGKTVKKRPQRAES*D-C(Sx)-FS-Z (SEQ ID NO: 3132), X-KGKTVKKRPQRAES*N-C(Sx)-FA-Z (SEQ ID NO: 3133), X-KGKTVKKRPQRAES*N-C(Sx)-FS-Z (SEQ ID NO: 3134), X-KGKTVKKRPQRAESD-C(Sx)-FS*-Z (SEQ ID NO: 3135), X-KGKTVKKRPQRAESN-C(Sx)-FS*-Z (SEQ ID NO: 3136), X-KGKTVKKRPQRAHS*D-C(Sx)-FA-Z (SEQ ID NO: 3137), X-KGKTVKKRPQRAHS*D-C(Sx)-FS-Z (SEQ ID NO: 3138), X-KGKTVKKRPQRAHS*N-C(Sx)-FA-Z (SEQ ID NO: 3139), X-KGKTVKKRPQRAHS*N-C(Sx)-FS-Z (SEQ ID NO: 3140), X-KGKTVKKRPQRAHSD-C(Sx)-FS*-Z (SEQ ID NO: 3141), X-KGKTVKKRPQRAHSN-C(Sx)-FS*-Z (SEQ ID NO: 3142), X-KGKTVKKRPQRATS*D-C(Sx)-FA-Z (SEQ ID NO: 3143), X-KGKTVKKRPQRATS*D-C(Sx)-FS-Z (SEQ ID NO: 3144), X-KGKTVKKRPQRATS*N-C(Sx)-FA-Z (SEQ ID NO: 3145), X-KGKTVKKRPQRATS*N-C(Sx)-FS-Z (SEQ ID NO: 3146), X-KGKTVKKRPQRATSD-C(Sx)-FS*-Z (SEQ ID NO: 3147), X-KGKTVKKRPQRATSN-C(Sx)-FS*-Z (SEQ ID NO: 3148), X-KGRPQRAT*S-C(Sx)-VFAMF-Z (SEQ ID NO: 3149), X-KGTLR-C(Sx)-MS*PEQISSQ-Z (SEQ ID NO: 3150), X-KGTLRYMS*P-C(Sx)-QISSQ-Z (SEQ ID NO: 3151), X-KHKKKKKRPQRADS*D-C(Sx)-FA-Z (SEQ ID NO: 3152), X-KHKKKKKRPQRADS*D-C(Sx)-FS-Z (SEQ ID NO: 3153), X-KHKKKKKRPQRADS*N-C(Sx)-FA-Z (SEQ ID NO: 3154), X-KHKKKKKRPQRADS*N-C(Sx)-FS-Z (SEQ ID NO: 3155), X-KHKKKKKRPQRADSD-C(Sx)-FS*-Z (SEQ ID NO: 3156), X-KHKKKKKRPQRADSN-C(Sx)-FS*-Z (SEQ ID NO: 3157); wherein X— is H or acetyl; and Z is OH or NH2.

[0147] In some embodiments, the metal-binding compound of the present invention is selected from the group consisting of: X-KHKKKKKRPQRAES*D-C(Sx)-FA-Z (SEQ ID NO: 3158), X-KHKKKKKRPQRAES*D-C(Sx)-FS-Z (SEQ ID NO: 3159), X-KHKKKKKRPQRAES*N-C(Sx)-FA-Z (SEQ ID NO: 3160), X-KHKKKKKRPQRAES*N-C(Sx)-FS-Z (SEQ ID NO: 3161), X-KHKKKKKRPQRAESD-C(Sx)-FS*-Z (SEQ ID NO: 3162), X-KHKKKKKRPQRAESN-C(Sx)-FS*-Z (SEQ ID NO: 3163), X-KHKKKKKRPQRAHS*D-C(Sx)-FA-Z (SEQ ID NO: 3164), X-KHKKKKKRPQRAHS*D-C(Sx)-FS-Z (SEQ ID NO: 3165), X-KHKKKKKRPQRAHS*N-C(Sx)-FA-Z (SEQ ID NO: 3166), X-KHKKKKKRPQRAHS*N-C(Sx)-FS-Z (SEQ ID NO: 3167), X-KHKKKKKKRPQRAHSD-C(Sx)-FS*-Z (SEQ ID NO: 3168), X-KHKKKKKRPQRAHSN-C(Sx)-FS*-Z (SEQ ID NO: 3169), X-KHKKKKKRPQRATS*D-C(Sx)-FA-Z (SEQ ID NO: 3170), X-KHKKKKKRPQRATS*D-C(Sx)-FS-Z (SEQ ID NO: 3171), X-KHKKKKKRPQRATS*N-C(Sx)-FA-Z (SEQ ID NO: 3172), X-KHKKKKKRPQRATS*N-C(Sx)-FS-Z (SEQ ID NO: 3173), X-KHKKKKKRPQRATSD-C(Sx)-FS*-Z (SEQ ID NO: 3174), X-KHKKKKKRPQRATSN-C(Sx)-FS*-Z (SEQ ID NO: 3175), X-KHKKRKKRPQRADS*D-C(Sx)-FA-Z (SEQ ID NO: 3176), X-KHKKRKKRPQRADS*D-C(Sx)-FS-Z (SEQ ID NO: 3177), X-KHKKRKKRPQRADS*N-C(Sx)-FA-Z (SEQ ID NO: 3178), X-KHKKRKKRPQRADS*N-C(Sx)-FS-Z (SEQ ID NO: 3179), X-KHKKRKKRPQRADSD-C(Sx)-FS*-Z (SEQ ID NO: 3180), X-KHKKRKKRPQRADSN-C(Sx)-FS*-Z (SEQ ID NO: 3181), X-KHKKRKKRPQRAES*D-C(Sx)-FA-Z (SEQ ID NO: 3182), X-KHKKRKKRPQRAES*D-C(Sx)-FS-Z (SEQ ID NO: 3183), X-KHKKRKKRPQRAES*N-C(Sx)-FA-Z (SEQ ID NO: 3184), X-KHKKRKKRPQRAES*N-C(Sx)-FS-Z (SEQ ID NO: 3185), X-KHKKRKKRPQRAESD-C(Sx)-FS*-Z (SEQ ID NO: 3186), X-KHKKRKKRPQRAESN-C(Sx)-FS*-Z (SEQ ID NO: 3187), X-KHKKRKKRPQRAHS*D-C(Sx)-FA-Z (SEQ ID NO: 3188), X-KHKKRKKRPQRAHS*D-C(Sx)-FS-Z (SEQ ID NO: 3189), X-KHKKRKKRPQRAHS*N-C(Sx)-FA-Z (SEQ ID NO: 3190), X-KHKKRKKRPQRAHS*N-C(Sx)-FS-Z (SEQ ID NO: 3191), X-KHKKRKKRPQRAHSD-C(Sx)-FS*-Z (SEQ ID NO: 3192), X-KHKKRKKRPQRAHSN-C(Sx)-FS*-Z (SEQ ID NO: 3193), X-KHKKRKKRPQRATS*D-C(Sx)-FA-Z (SEQ ID NO: 3194), X-KHKKRKKRPQRATS*D-C(Sx)-FS-Z (SEQ ID NO: 3195), X-KHKKRKKRPQRATS*N-C(Sx)-FA-Z (SEQ ID NO: 3196), X-KHKKRKKRPQRATS*N-C(Sx)-FS-Z (SEQ ID NO: 3197), X-KHKKRKKRPQRATSD-C(Sx)-FS*-Z (SEQ ID NO: 3198), X-KHKKRKKRPQRATSN-C(Sx)-FS*-Z (SEQ ID NO: 3199), X-KHKKTKKRPQRADS*D-C(Sx)-FA-Z (SEQ ID NO: 3200), X-KHKKTKKRPQRADS*D-C(Sx)-FS-Z (SEQ ID NO: 3201), X-KHKKTKKRPQRADS*N-C(Sx)-FA-Z (SEQ ID NO: 3202), X-KHKKTKKRPQRADS*N-C(Sx)-FS-Z (SEQ ID NO: 3203), X-KHKKTKKRPQRADSD-C(Sx)-FS*-Z (SEQ ID NO: 3204), X-KHKKTKKRPQRADSN-C(Sx)-FS*-Z (SEQ ID NO: 3205), X-KHKKTKKRPQRAES*D-C(Sx)-FA-Z (SEQ ID NO: 3206), X-KHKKTKKRPQRAES*D-C(Sx)-FS-Z (SEQ ID NO: 3207), X-KHKKTKKRPQRAES*N-C(Sx)-FA-Z (SEQ ID NO: 3208), X-KHKKTKKRPQRAES*N-C(Sx)-FS-Z (SEQ ID NO: 3209), X-KHKKTKKRPQRAESD-C(Sx)-FS*-Z (SEQ ID NO: 3210), X-KHKKTKKRPQRAESN-C(Sx)-FS*-Z (SEQ ID NO: 3211), and X-KHKKTKKRPQRAHS*D-C(Sx)-FA-Z (SEQ ID NO: 3212); wherein X is H or acetyl; and Z is OH or NH2.

[0148] In some embodiments, the metal-binding compound of the present invention is selected from the group consisting of: X-KHKKTKKRPQRAHS*D-C(Sx)-FS-Z (SEQ ID NO: 3213), X-KHKKTKKRPQRAHS*N-C(Sx)-FA-Z (SEQ ID NO: 3214), X-KHKKTKKRPQRAHS*N-C(Sx)-FS-Z (SEQ ID NO: 3215), X-KHKKTKKRPQRAHSD-C(Sx)-FS*-Z (SEQ ID NO: 3216), X-KHKKTKKRPQRAHSN-C(Sx)-FS*-Z (SEQ ID NO: 3217), X-KHKKTKKRPQRATS*D-C(Sx)-FA-Z (SEQ ID NO: 3218), X-KHKKTKKRPQRATS*D-C(Sx)-FS-Z (SEQ ID NO: 3219), X-KHKKTKKRPQRATS*N-C(Sx)-FA-Z (SEQ ID NO: 3220), X-KHKKTKKRPQRATS*N-C(Sx)-FS-Z (SEQ ID NO: 3221), X-KHKKTKKRPQRATSD-C(Sx)-FS*-Z (SEQ ID NO: 3222), X-KHKKTKKRPQRATSN-C(Sx)-FS*-Z (SEQ ID NO: 3223), X-KHKKVKKRPQRADS*D-C(Sx)-FA-Z (SEQ ID NO: 3224), X-KHKKVKKRPQRADS*D-C(Sx)-FS-Z (SEQ ID NO: 3225), X-KHKKVKKRPQRADS*N-C(Sx)-FA-Z (SEQ ID NO: 3226), X-KHKKVKKRPQRADS*N-C(Sx)-FS-Z (SEQ ID NO: 3227), X-KHKKVKKRPQRADSD-C(Sx)-FS*-Z (SEQ ID NO: 3228), X-KHKKVKKRPQRADSN-C(Sx)-FS*-Z (SEQ ID NO: 3229), X-KHKKVKKRPQRAES*D-C(Sx)-FA-Z (SEQ ID NO: 3230), X-KHKKVKKRPQRAES*D-C(Sx)-FS-Z (SEQ ID NO: 3231), X-KHKKVKKRPQRAES*N-C(Sx)-FA-Z (SEQ ID NO: 3232), X-KHKKVKKRPQRAES*N-C(Sx)-FS-Z (SEQ ID NO: 3233), X-KHKKVKKRPQRAESD-C(Sx)-FS*-Z (SEQ ID NO: 3234), X-KHKKVKKRPQRAESN-C(Sx)-FS*-Z (SEQ ID NO: 3235), X-KHKKVKKRPQRAHS*D-C(Sx)-FA-Z (SEQ ID NO: 3236), X-KHKKVKKRPQRAHS*D-C(Sx)-FS-Z (SEQ ID NO: 3237), X-KHKKVKKRPQRAHS*N-C(Sx)-FA-Z (SEQ ID NO: 3238), X-KHKKVKKRPQRAHS*N-C(Sx)-FS-Z (SEQ ID NO: 3239), X-KHKKVKKRPQRAHSD-C(Sx)-FS*-Z (SEQ ID NO: 3240), X-KHKKVKKRPQRAHSN-C(Sx)-FS*-Z (SEQ ID NO: 3241), X-KHKKVKKRPQRATS*D-C(Sx)-FA-Z (SEQ ID NO: 3242), X-KHKKVKKRPQRATS*D-C(Sx)-FS-Z (SEQ ID NO: 3243), X-KHKKVKKRPQRATS*N-C(Sx)-FA-Z (SEQ ID NO: 3244), X-KHKKVKKRPQRATS*N-C(Sx)-FS-Z (SEQ ID NO: 3245), X-KHKKVKKRPQRATSD-C(Sx)-FS*-Z (SEQ ID NO: 3246), X-KHKKVKKRPQRATSN-C(Sx)-FS*-Z (SEQ ID NO: 3247), X-KHKTKKKRPQRADS*D-C(Sx)-FA-Z (SEQ ID NO: 3248), X-KHKTKKKRPQRADS*D-C(Sx)-FS-Z (SEQ ID NO: 3249), X-KHKTKKKRPQRADS*N-C(Sx)-FA-Z (SEQ ID NO: 3250), X-KHKTKKKRPQRADS*N-C(Sx)-FS-Z (SEQ ID NO: 3251), X-KHKTKKKRPQRADSD-C(Sx)-FS*-Z (SEQ ID NO: 3252), X-KHKTKKKRPQRADSN-C(Sx)-FS*-Z (SEQ ID NO: 3253), X-KHKTKKKRPQRAES*D-C(Sx)-FA-Z (SEQ ID NO: 3254), X-KHKTKKKRPQRAES*D-C(Sx)-FS-Z (SEQ ID NO: 3255), X-KHKTKKKRPQRAES*N-C(Sx)-FA-Z (SEQ ID NO: 3256), X-KHKTKKKRPQRAES*N-C(Sx)-FS-Z (SEQ ID NO: 3257), X-KHKTKKKRPQRAESD-C(Sx)-FS*-Z (SEQ ID NO: 3258), X-KHKTKKKRPQRAESN-C(Sx)-FS*-Z (SEQ ID NO: 3259), X-KHKTKKKRPQRAHS*D-C(Sx)-FA-Z (SEQ ID NO: 3260), X-KHKTKKKRPQRAHS*D-C(Sx)-FS-Z (SEQ ID NO: 3261), X-KHKTKKKRPQRAHS*N-C(Sx)-FA-Z (SEQ ID NO: 3262), X-KHKTKKKRPQRAHS*N-C(Sx)-FS-Z (SEQ ID NO: 3263), X-KHKTKKKRPQRAHSD-C(Sx)-FS*-Z (SEQ ID NO: 3264), X-KHKTKKKRPQRAHSN-C(Sx)-FS*-Z (SEQ ID NO: 3265), X-KHKTKKKRPQRATS*D-C(Sx)-FA-Z (SEQ ID NO: 3266), X-KHKTKKKRPQRATS*D-C(Sx)-FS-Z (SEQ ID NO: 3267), X-KHKTKKKRPQRATS*N-C(Sx)-FA-Z (SEQ ID NO: 3268), X-KHKTKKKRPQRATS*N-C(Sx)-FS-Z (SEQ ID NO: 3269), X-KHKTKKKRPQRATSD-C(Sx)-FS*-Z (SEQ ID NO: 3270), X-KHKTKKKRPQRATSN-C(Sx)-FS*-Z (SEQ ID NO: 3271), X-KHKTRKKRPQRADS*D-C(Sx)-FA-Z (SEQ ID NO: 3272), X-KHKTRKKRPQRADS*D-C(Sx)-FS-Z (SEQ ID NO: 3273), X-KHKTRKKRPQRADS*N-C(Sx)-FA-Z (SEQ ID NO: 3274), X-KHKTRKKRPQRADS*N-C(Sx)-FS-Z (SEQ ID NO: 3275), X-KHKTRKKRPQRADSD-C(Sx)-FS*-Z (SEQ ID NO: 3276), X-KHKTRKKRPQRADSN-C(Sx)-FS*-Z (SEQ ID NO: 3277), X-KHKTRKKRPQRAES*D-C(Sx)-FA-Z (SEQ ID NO: 3278), X-KHKTRKKRPQRAES*D-C(Sx)-FS-Z (SEQ ID NO: 3279), and X-KHKTRKKRPQRAES*N-C(Sx)-FA-Z (SEQ ID NO: 3280); wherein X is H or acetyl; and Z is OH or NH2.

[0149] In some embodiments, the metal-binding compound of the present invention is selected from the group consisting of: X-KHKTRKKRPQRAES*N-C(Sx)-FS-Z (SEQ ID NO: 3281), X-KHKTRKKRPQRAESD-C(Sx)-FS*-Z (SEQ ID NO: 3282), X-KHKTRKKRPQRAESN-C(Sx)-FS*-Z (SEQ ID NO: 3283), X-KHKTRKKRPQRAHS*D-C(Sx)-FA-Z (SEQ ID NO: 3284), X-KHKTRKKRPQRAHS*D-C(Sx)-FS-Z (SEQ ID NO: 3285), X-KHKTRKKRPQRAHS*N-C(Sx)-FA-Z (SEQ ID NO: 3286), X-KHKTRKKRPQRAHS*N-C(Sx)-FS-Z (SEQ ID NO: 3287), X-KHKTRKKRPQRAHSD-C(Sx)-FS*-Z (SEQ ID NO: 3288), X-KHKTRKKRPQRAHSN-C(Sx)-FS*-Z (SEQ ID NO: 3289), X-KHKTRKKRPQRATS*D-C(Sx)-FA-Z (SEQ ID NO: 3290), X-KHKTRKKRPQRATS*D-C(Sx)-FS-Z (SEQ ID NO: 3291), X-KHKTRKKRPQRATS*N-C(Sx)-FA-Z (SEQ ID NO: 3292), X-KHKTRKKRPQRATS*N-C(Sx)-FS-Z (SEQ ID NO: 3293), X-KHKTRKKRPQRATSD-C(Sx)-FS*-Z (SEQ ID NO: 3294), X-KHKTRKKRPQRATSN-C(Sx)-FS*-Z (SEQ ID NO: 3295), X-KHKTIKKRPQRADS*D-C(Sx)-FA-Z (SEQ ID NO: 3296), X-KHKITKKRPQRADS*D-C(Sx)-FS-Z (SEQ ID NO: 3297), X-KHKTTKKRPQRADS*N-C(Sx)-FA-Z (SEQ ID NO: 3298), X-KHKITKKRPQRADS*N-C(Sx)-FS-Z (SEQ ID NO: 3299), X-KHKITKKRPQRADSD-C(Sx)-FS*-Z (SEQ ID NO: 3300), X-KHKTTKKRPQRADSN-C(Sx)-FS*-Z (SEQ ID NO: 3301), X-KHKTTKKRPQRAES*D-C(Sx)-FA-Z (SEQ ID NO: 3302), X-KHKTITKKRPQRAES*D-C(Sx)-FS-Z (SEQ ID NO: 3303), X-KHKITKKRPQRAES*N-C(Sx)-FA-Z (SEQ ID NO: 3304), X-KHKITKKRPQRAES*N-C(Sx)-FS-Z (SEQ ID NO: 3305), X-KHKTTKKRPQRAESD-C(Sx)-FS*-Z (SEQ ID NO: 3306), X-KHKITKKRPQRAESN-C(Sx)-FS*-Z (SEQ ID NO: 3307), X-KHKTIKKRPQRAHS*D-C(Sx)-FA-Z (SEQ ID NO: 3308), X-KHKITKKRPQRAHS*D-C(Sx)-FS-Z (SEQ ID NO: 3309), X-KHKTTKKRPQRAHS*N-C(Sx)-FA-Z (SEQ ID NO: 3310), X-KHKTKKRPQRAHS*N-C(Sx)-FS-Z (SEQ ID NO: 3311), X-KHKTTKKRPQRAHSD-C(Sx)-FS*-Z (SEQ ID NO: 3312), X-KHKTTKKRPQRAHSN-C(Sx)-FS*-Z (SEQ ID NO: 3313), X-KHKTTKKRPQRATS*D-C(Sx)-FA-Z (SEQ ID NO: 3314), X-KHKTTKKRPQRATS*D-C(Sx)-FS-Z (SEQ ID NO: 3315), X-KHKTTKKRPQRATS*N-C(Sx)-FA-Z (SEQ ID NO: 3316), X-KHKTVKKRPQRATS*N-C(Sx)-FS-Z (SEQ ID NO: 3317), X-KHKTTKKRPQRATSD-C(Sx)-FS*-Z (SEQ ID NO: 3318), X-KHKTITKKRPQRATSN-C(Sx)-FS*-Z (SEQ ID NO: 3319), X-KHKTVKKRPQRADS*D-C(Sx)-FA-Z (SEQ ID NO: 3320), X-KHKTVKKRPQRADS*D-C(Sx)-FS-Z (SEQ ID NO: 3321), X-KHKTVKKRPQRADS*N-C(Sx)-FA-Z (SEQ ID NO: 3322), X-KHKTVKKRPQRADS*N-C(Sx)-FS-Z (SEQ ID NO: 3323), and X-KHKTVKKRPQRADSD-C(Sx)-FS*-Z (SEQ ID NO: 3324); wherein X is H or acetyl; and Z is OH or NH2.

[0150] In some embodiments, the metal-binding compound of the present invention is selected from the group consisting of: X-KHKTVKKRPQRADSN-C(Sx)-FS*-Z (SEQ ID NO: 3325), X-KHKTVKKRPQRAES*D-C(Sx)-FA-Z (SEQ ID NO: 3326), X-KHKTVKKRPQRAES*D-C(Sx)-FS-Z (SEQ ID NO: 3327), X-KHKTVKKRPQRAES*N-C(Sx)-FA-Z (SEQ ID NO: 3328), X-KHKTVKKRPQRAES*N-C(Sx)-FS-Z (SEQ ID NO: 3329), X-KHKTVKKRPQRAESD-C(Sx)-FS*-Z (SEQ ID NO: 3330), X-KHKTVKKRPQRAESN-C(Sx)-FS*-Z (SEQ ID NO: 3331), X-KHKTVKKRPQRAHS*D-C(Sx)-FA-Z (SEQ ID NO: 3332), X-KHKTVKKRPQRAHS*D-C(Sx)-FS-Z (SEQ ID NO: 3333), X-KHKTVKKRPQRAHS*N-C(Sx)-FA-Z (SEQ ID NO: 3334), X-KHKTVKKRPQRAHS*N-C(Sx)-FS-Z (SEQ ID NO: 3335), X-KHKTVKKRPQRAHSD-C(Sx)-FS*-Z (SEQ ID NO: 3336), X-KHKTVKKRPQRAHSN-C(Sx)-FS*-Z (SEQ ID NO: 3337), X-KHKTVKKRPQRATS*D-C(Sx)-FA-Z (SEQ ID NO: 3338), X-KHKTVKKRPQRATS*D-C(Sx)-FS-Z (SEQ ID NO: 3339), X-KHKTVKKRPQRATS*N-C(Sx)-FA-Z (SEQ ID NO: 3340), X-KHKTVKKRPQRATS*N-C(Sx)-FS-Z (SEQ ID NO: 3341), X-KHKTVKKRPQRATSD-C(Sx)-FS*-Z (SEQ ID NO: 3342), X-KHKTVKKRPQRATSN-C(Sx)-FS*-Z (SEQ ID NO: 3343), X-KHRPQRAT*S-C(Sx)-VFAMF-Z (SEQ ID NO: 3344), X-KIKTTKKRPQRATS*N-C(Sx)-FS-Z (SEQ ID NO: 3345), X-KIKTTKKRPQRATSN-C(Sx)-FS*-Z (SEQ ID NO: 3346), X-KIRPQRAT*S-C(Sx)-VFAMF-Z (SEQ ID NO: 3347), X-KK[Nle]PQRAT*S-C(Sx)-VFAMF-Z (SEQ ID NO: 3348), X-KK-C(Sx)-AS*FKK-Z (SEQ ID NO: 3349), X-KK-C(Sx)-AS*FRR-Z (SEQ ID NO: 3350), X-KKCDLGYAKDVDQGS*L-C(Sx)-TSFVGTLQYLAPECKK-Z (SEQ ID NO: 1017), X-KKCDLGYAKDVDQGSL-C(Sx)-TS*FVGTLQYLAPECKK-Z (SEQ ID NO: 1018), X-KKCVSGQLIDS*M-C(Sx)-NSFVGTRSYCKK-Z (SEQ ID NO: 1007), X-KKCVSGQLIDSM-C(Sx)-NS*FVGTRSYCKK-Z (SEQ ID NO: 1008), X-KKDPQRAT*S-C(Sx)-VFAMF-Z (SEQ ID NO: 3351), X-KKEPQRAT*S-C(Sx)-VFAMF-Z (SEQ ID NO: 3352), X-KKERLLDDRHDS*G-C(Sx)-DSMKDEE-Z (SEQ ID NO: 3353), X-KKERLLDDRHDSG-C(Sx)-DS*MKDEE-Z (SEQ ID NO: 3354), X-KKERLLDDRHDSGLDS*M-C(Sx)-DEE-Z (SEQ ID NO: 3355), X-KKFPQRAT*S-C(Sx)-VFAMF-Z (SEQ ID NO: 3356), X-KKGPQRAT*S-C(Sx)-VFAMF-Z (SEQ ID NO: 3357), X-KKHPQRAT*S-C(Sx)-VFAMF-Z (SEQ ID NO: 3358), and X-KKIPQRAT*S-C(Sx)-VFAMF-Z (SEQ ID NO: 3359); wherein X— is H or acetyl; and Z is OH or NH2.

[0151] In some embodiments, the metal-binding compound of the present invention is selected from the group consisting of: X-KKIS*G-C(Sx)-LSPI[Nle]TEQ-Z (SEQ ID NO: 3360), X-KKISG-C(Sx)-LS*PI[Nle]TEQ-Z (SEQ ID NO: 3361), X-KKISGRLS*P-C(Sx)-[Nle]TEQ-Z (SEQ ID NO: 3362), X-KKISGRLSP-C(Sx)-[Nle]T*EQ-Z (SEQ ID NO: 3363), X-KKKADKQFLIS*P-C(Sx)-ASP-Z (SEQ ID NO: 3364), X-KKKADKQFLISP-C(Sx)-AS*P-Z (SEQ ID NO: 3365), X-KKKAEPLPPSYV-C(Sx)-AS*-Z (SEQ ID NO: 3366), X-KKKAGTSF[Nle][Nle]T*P-C(Sx)-VVTR-Z (SEQ ID NO: 3367), X-KKKANPSPPPS*P-C(Sx)-QQINL-Z (SEQ ID NO: 3368), X-KKKAPLSTWSGS*P-C(Sx)-YAAPE-Z (SEQ ID NO: 3369), X-KKKDGR[Nle]VQLS*P-C(Sx)-ALAAP-Z (SEQ ID NO: 3370), X-KKKFQGQLLGT*I-C(Sx)-F[Nle]APE-Z (SEQ ID NO: 3371), X-KKKGDNVLINT*Y-C(Sx)-GVLKI-Z (SEQ ID NO: 3372), X-KKKGHITITPT*P-C(Sx)-QFL-Z (SEQ ID NO: 3373), X-KKKGINPSTET*F-C(Sx)-GTLQY-Z (SEQ ID NO: 3374), X-KKKGINPSTETF-C(Sx)-GT*LQY-Z (SEQ ID NO: 3375), X-KKKGNLLPMS*P-C(Sx)-EFD-Z (SEQ ID NO: 3376), X-KKKGQSSAAAT*P-C(Sx)-TTGTK-Z (SEQ ID NO: 3377), X-KKKGTQREGVSS*L-C(Sx)-SSSL-Z (SEQ ID NO: 3378), X-KKKGTQREGVSSL-C(Sx)-SS*SL-Z (SEQ ID NO: 3379), X-KKKGVITITPT*P-C(Sx)-GQYFY-Z (SEQ ID NO: 3380), X-KKKHQLFRGFS*F-C(Sx)-AITSD-Z (SEQ ID NO: 3381), X-KKKIHFWSSLS*P-C(Sx)-APLSP-Z (SEQ ID NO: 3382), X-KKKKKKKRPQRADS*D-C(Sx)-FA-Z (SEQ ID NO: 3383), X-KKKKKKKRPQRADS*D-C(Sx)-FS-Z (SEQ ID NO: 3384), X-KKKKKKKRPQRADS*N-C(Sx)-FA-Z (SEQ ID NO: 3385), X-KKKKKKKRPQRADS*N-C(Sx)-FS-Z (SEQ ID NO: 3386), X-KKKKKKKRPQRADSD-C(Sx)-FS*-Z (SEQ ID NO: 3387), X-KKKKKKKRPQRADSN-C(Sx)-FS*-Z (SEQ ID NO: 3388), X-KKKKKKKKKKRPQRAES*D-C(Sx)-FA-Z (SEQ ID NO: 3389), X-KKKKKKKRPQRAES*D-C(Sx)-FS-Z (SEQ ID NO: 3390), X-KCKKKKKKRPQRAHS*N-C(Sx)-FA-Z (SEQ ID NO: 3391), X-KCKKKKKKRPQRAES*N-C(Sx)-FS-Z (SEQ ID NO: 3392), X-KCKKKKKKRPQRAESD-C(Sx)-FS*-Z (SEQ ID NO: 3393), X-KCKKKKKKRPQRAESN-C(Sx)-FS*-Z (SEQ ID NO: 3394), X-KKKKKKKRPQRAHS*D-C(Sx)-FA-Z (SEQ ID NO: 3395), X-KCKKKKKKRPQRAHS*D-C(Sx)-FS-Z (SEQ ID NO: 3396), X-KCKKKKKKRPQRAHS*N-C(Sx) FA-Z (SEQ ID NO: 3397), X-KCKKKKKKRPQRAHS*N-C(Sx)-FS-Z (SEQ ID NO: 3398), X-KCKKKKKKRPQRAHSD-C(Sx)-FS*-Z (SEQ ID NO: 3399), X-KKKKKKKRPQRAHSN-C(Sx)-FS*-Z (SEQ ID NO: 3400), X-KKKKKKKRPQRATS*D-C(Sx)-FA-Z (SEQ ID NO: 3401), X-KCKKKKKKRPQRATS*D-C(Sx)-FS-Z (SEQ ID NO: 3402), X-KCKKKKKKRPQRATS*N-C(Sx)-FA-Z (SEQ ID NO: 3403), X-KCKKKKKKRPQRATS*N-C(Sx)-FS-Z (SEQ ID NO: 3404), X-KCKKKKKKRPQRATSD-C(Sx)-FS*-Z (SEQ ID NO: 3405), X-KCKKKKKKRPQRATSN-C(Sx)-FS*-Z (SEQ ID NO: 3406), X-KCKKKRKKRPQRADS*D-C(Sx)-FA-Z (SEQ ID NO: 3407), X-KCKKKRKKRPQRADS*D-C(Sx)-FS-Z (SEQ ID NO: 3408), X-KKKKRKKRPQRADS*N-C(Sx)-FA-Z (SEQ ID NO: 3409), X-KCKKKRKKRPQRADS*N-C(Sx)-FS-Z (SEQ ID NO: 3410), X-KCKKKRKKRPQRADSD-C(Sx)-FS*-Z (SEQ ID NO: 3411), X-KKKKRKKRPQRADSN-C(Sx)-FS*-Z (SEQ ID NO: 3412), X-KCKKKRKKRPQRAES*D-C(Sx)-FA-Z (SEQ ID NO: 3413), X-KCKKKRKKRPQRAES*D-C(Sx)-FS-Z (SEQ ID NO: 3414), X-KCKKKRKKRPQRAES*N-C(Sx)-FA-Z (SEQ ID NO: 3415), X-KCKKKRKKRPQRAES*N-C(Sx)-FS-Z (SEQ ID NO: 3416), X-KCKKKRKKRPQRAESD-C(Sx)-FS*-Z (SEQ ID NO: 3417), X-KCKKKRKKRPQRAESN-C(Sx)-FS*-Z (SEQ ID NO: 3418), X-KCKKKRKKRPQRAHS*D-C(Sx)-FA-Z (SEQ ID NO: 3419), X-KCKKKKKKRPQRAHS*D-C(Sx)-FS-Z (SEQ ID NO: 3420), X-KKKKRKKRPQRAHS*N-C(Sx)-FA-Z (SEQ ID NO: 3421), X-KCKKKRKKRPQRAHS*N-C(Sx)-FS-Z (SEQ ID NO: 3422), X-KCKKKRKKRPQRAHSD-C(Sx)-FS*-Z (SEQ ID NO: 3423), X-KKKKRKKRPQRAHSN-C(Sx)-FS*-Z (SEQ ID NO: 3424), X-KKKKRKKRPQRATS*D-C(Sx)-FA-Z (SEQ ID NO: 3425), X-KCKKKRKKRPQRATS*D-C(Sx)-FS-Z (SEQ ID NO: 3426), X-KCKKKRKKRPQRATS*N-C(Sx)-FA-Z (SEQ ID NO: 3427), and X-KCKKKRKKRPQRATS*N-C(Sx)-FS-Z (SEQ ID NO: 3428); wherein X is H or acetyl; and Z is OH or NH2.

[0152] In some embodiments, the metal-binding compound of the present invention is selected from the group consisting of: X-KCKKKRKKRPQRATSD-C(Sx)-FS*-Z (SEQ ID NO: 3429), X-KKKKRKKRPQRATSN-C(Sx)-FS*-Z (SEQ ID NO: 3430), X-KKKKTKKRPQRADS*D-C(Sx)-FA-Z (SEQ ID NO: 3431), X-KKKKTKKRPQRADS*D-C(Sx)-FS-Z (SEQ ID NO: 3432), X-KKKKTKKRPQRADS*N-C(Sx)-FA-Z (SEQ ID NO: 3433), X-KKKKTKKRPQRADS*N-C(Sx)-FS-Z (SEQ ID NO: 3434), X-KKKKTKKRPQRADSD-C(Sx)-FS*-Z (SEQ ID NO: 3435), X-KKKKTKKRPQRADSN-C(Sx)-FS*-Z (SEQ ID NO: 3436), X-KKKKTKKRPQRAES*D-C(Sx)-FA-Z (SEQ ID NO: 3437), X-KKKKTKKRPQRAES*D-C(Sx)-FS-Z (SEQ ID NO: 3438), X-KKKKTKKRPQRAES*N-C(Sx)-FA-Z (SEQ ID NO: 3439), X-KKKKTKKRPQRAES*N-C(Sx)-FS-Z (SEQ ID NO: 3440), X-KKKKTKKRPQRAESD-C(Sx)-FS*-Z (SEQ ID NO: 3441), X-KKKKTKKRPQRAESN-C(Sx)-FS*-Z (SEQ ID NO: 3442), X-KKKKTKKRPQRAHS*D-C(Sx)-FA-Z (SEQ ID NO: 3443), X-KKKKTKKRPQRAHS*D-C(Sx)-FS-Z (SEQ ID NO: 3444), X-KKKKTKKRPQRAHS*N-C(Sx)-FA-Z (SEQ ID NO: 3445), X-KKKKTKKRPQRAHS*N-C(Sx)-FS-Z (SEQ ID NO: 3446), X-KKKKTKKRPQRAHSD-C(Sx)-FS*-Z (SEQ ID NO: 3447), X-KKKKTKKRPQRAHSN-C(Sx)-FS*-Z (SEQ ID NO: 3448), X-KKKKTKKRPQRATS*D-C(Sx)-FA-Z (SEQ ID NO: 3449), X-KKKKTKKRPQRATS*D-C(Sx)-FS-Z (SEQ ID NO: 3450), X-KKKKTKKRPQRATS*N-C(Sx)-FA-Z (SEQ ID NO: 3451), X-KKKKTKKRPQRATS*N-C(Sx)-FS-Z (SEQ ID NO: 3452), X-KKKKTKKRPQRATSD-C(Sx)-FS*-Z (SEQ ID NO: 3453), X-KKKKTKKRPQRATSN-C(Sx)-FS*-Z (SEQ ID NO: 3454), X-KKKKVKKRPQRA[hE]S*D-C(Sx)-FS-Z (SEQ ID NO: 3455), X-KKKKVKKRPQRA[hE]SD-C(Sx)-FS*-Z (SEQ ID NO: 3456), X-KKKKVKKRPQRADS*D-C(Sx)-FA-Z (SEQ ID NO: 3457), X-KKKKVKKRPQRADS*D-C(Sx)-FS-Z (SEQ ID NO: 3458), X-KKKKVKKRPQRADS*N-C(Sx)-FA-Z (SEQ ID NO: 3459), X-KKKKVKKRPQRADS*N-C(Sx)-FS-Z (SEQ ID NO: 3460), X-KKKKVKKRPQRADSD-C(Sx)-FS*-Z (SEQ ID NO: 3461), and X-KKKKVKKRPQRADSN-C(Sx)-FS*-Z (SEQ ID NO: 3462); wherein X is H or acetyl; and Z is OH or NH2.

[0153] In some embodiments, the metal-binding compound of the present invention is selected from the group consisting of: X-KKKKVKKRPQRAES*D-C(Sx)-FA-Z (SEQ ID NO: 3463), X-KKKKVKKRPQRAES*D-C(Sx)-FS-Z (SEQ ID NO: 3464), X-KKKKVKKRPQRAES*N-C(Sx)-FA-Z (SEQ ID NO: 3465), X-KKKKVKKRPQRAES*N-C(Sx)-FS-Z (SEQ ID NO: 3466), X-KKKKVKKRPQRAESD-C(Sx)-FS*-Z (SEQ ID NO: 3467), X-KKKKVKKRPQRAESN-C(Sx)-FS*-Z (SEQ ID NO: 3468), X-KKKKVKKRPQRAHS*D-C(Sx)-FA-Z (SEQ ID NO: 3469), X-KKKKVKKRPQRAHS*D-C(Sx)-FS-Z (SEQ ID NO: 3470), X-KKKKVKKRPQRAHS*N-C(Sx)-FA-Z (SEQ ID NO: 3471), X-KKKKVKKRPQRAHS*N-C(Sx)-FS-Z (SEQ ID NO: 3472), X-KKKKVKKRPQRAHSD-C(Sx)-FS*-Z (SEQ ID NO: 3473), X-KKKKVKKRPQRAHSN-C(Sx)-FS*-Z (SEQ ID NO: 3474), X-KKKKVKKRPQRATS*D-C(Sx)-FA-Z (SEQ ID NO: 3475), X-KKKKVKKRPQRATS*D-C(Sx)-FS-Z (SEQ ID NO: 3476), X-KKKKVKKRPQRATS*N-C(Sx)-FA-Z (SEQ ID NO: 3477), X-KKKKVKKRPQRATS*N-C(Sx)-FS-Z (SEQ ID NO: 3478), X-KKKKVKKRPQRATSD-C(Sx)-FS*-Z (SEQ ID NO: 3479), X-KKKKVKKRPQRATSN-C(Sx)-FS*-Z (SEQ ID NO: 3480), X-KKKLAPNPSFS*P-C(Sx)-PGFTP-Z (SEQ ID NO: 1102), X-KKKLIDS[Nle]ANS*F-C(Sx)-GTRSY-Z (SEQ ID NO: 3481), X-KKKLIDS[Nle]ANSF-C(Sx)-GT*RSY-Z (SEQ ID NO: 3482), X-KKKLPPVFSGT*P-C(Sx)-GSGAG-Z (SEQ ID NO: 3483), X-KKKLPPVFSGTP-C(Sx)-GS*GAG-Z (SEQ ID NO: 3484), X-KKKLSNSQGQS*P-C(Sx)-VPFPA-Z (SEQ ID NO: 3485), X-KKKLTDPRLLS*P-C(Sx)-QPALQ-Z (SEQ ID NO: 3486), X-KKKNVH[Nle]VSTT*L-C(Sx)-VDSR-Z (SEQ ID NO: 3487), X-KKKPLSPFPVS*P-C(Sx)-AGPGS-Z (SEQ ID NO: 3488), X-KKKPQPLRS*P-C(Sx)-LDNPT-Z (SEQ ID NO: 3489), X-KKKPQRAT*S-C(Sx)-VFAMF-Z (SEQ ID NO: 3490), X-KKKPSAPA-C(Sx)-ST*PGIRDSA-Z (SEQ ID NO: 3491), X-KKKPSAPALST*P-C(Sx)-IRDSA-Z (SEQ ID NO: 3492), X-KKKPSAPALST*PG-C(Sx)-RDSA-Z (SEQ ID NO: 3493), X-KKKQ[Nle]AGTPIT*P-C(Sx)-KDGFT-Z (SEQ ID NO: 3494), X-KKKQAATGFGS*P-C(Sx)-QYSAD-Z (SEQ ID NO: 3495), X-KKKQGPAPVGT*P-C(Sx)-FNRQH-Z (SEQ ID NO: 3496), X-KKKQLSKWPGS*P-C(Sx)-SRSSD-Z (SEQ ID NO: 3497), X-KKKQNRSGAMS*P-C(Sx)-SWNSD-Z (SEQ ID NO: 3498), X-KKKQS[Nle]VVPQT*P-C(Sx)-HTARV-Z (SEQ ID NO: 3499), X-KKKQS[Nle]VVPQTP-C(Sx)-HT*ARV-Z (SEQ ID NO: 3500), X-KKKQSAQS-C(Sx)-AT*PVVSVAT-Z (SEQ ID NO: 3501), X-KKKQSAQSLAT*P-C(Sx)-VSVAT-Z (SEQ ID NO: 3502), X-KKKQSAQSLATP-C(Sx)-VS*VAT-Z (SEQ ID NO: 3503), X-KKKRPASVNGS*P-C(Sx)-ATSES-Z (SEQ ID NO: 3504), X-KKKRPASVNGSP-C(Sx)-AT*SES-Z (SEQ ID NO: 3505), X-KKKS[Nle]DGLFGT*I-C(Sx)-YLP-Z (SEQ ID NO: 3506), X-KKKSALQG-C(Sx)-NS*PG[Nle]LSLG-Z (SEQ ID NO: 3507), X-KKKSALQGFNS*P-C(Sx)-[Nle]LSLG-Z (SEQ ID NO: 3508), X-KKKSASGSAFS*P-C(Sx)-PGSAA-Z (SEQ ID NO: 3509), X-KKKSAVNGTSS*A-C(Sx)-TNLEA-Z (SEQ ID NO: 3510), and X-KKKSGYS*S-C(Sx)-GSPGTPGSR-Z (SEQ ID NO: 3511); wherein X— is H or acetyl; and Z is OH or NH2.

[0154] In some embodiments, the metal-binding compound of the present invention is selected from the group consisting of: X-KKKSGYSS-C(Sx)-GS*PGTPGSR-Z (SEQ ID NO: 3512), X-KKKSGYSSPGS*P-C(Sx)-TPGSR-Z (SEQ ID NO: 3513), X-KKKSGYSSPGS*PG-C(Sx)-PGSR-Z (SEQ ID NO: 3514), X-KKKSNGHITIT*P-C(Sx)-PTQFL-Z (SEQ ID NO: 3515), X-KKKSNGHITITP-C(Sx)-PT*QFL-Z (SEQ ID NO: 3516), X-KKKSNGLVTIT*P-C(Sx)-SSQFL-Z (SEQ ID NO: 1120), X-KKKSNGLVTITP-C(Sx)-SS*QFL-Z (SEQ ID NO: 3517), X-KKKSNGVITIT*P-C(Sx)-PPGQY-Z (SEQ ID NO: 3518), X-KKKSNPALLSS*P-C(Sx)-YYSAA-Z (SEQ ID NO: 3519), X-KKKSPLNITST*P-C(Sx)-PDASS-Z (SEQ ID NO: 3520), X-KKKSVPSAAVT*P-C(Sx)-NESLQ-Z (SEQ ID NO: 3521), X-KKKSVSAATLT*P-C(Sx)-SQAVT-Z (SEQ ID NO: 3522), X-KKKTETFTGT*L-C(Sx)-Y[Nle]APE-Z (SEQ ID NO: 3523), X-KKKTKKKRPQRADS*D-C(Sx)-FA-Z (SEQ ID NO: 3524), X-KKKTKKKRPQRADS*D-C(Sx)-FS-Z (SEQ ID NO: 3525), X-KKKTKKKRPQRADS*N-C(Sx)-FA-Z (SEQ ID NO: 3526), X-K KTKKKRPQRADS*N-C(Sx)-FS-Z (SEQ ID NO: 3527), X-KKKTKKKRPQRADSD-C(Sx)-FS*-Z (SEQ ID NO: 3528), X-KKKTKKKRPQRADSN-C(Sx)-FS*-Z (SEQ ID NO: 3529), X-KKKTKKKRPQRAES*D-C(Sx)-FA-Z (SEQ ID NO: 3530), X-KTKTKKKRPQRAES*D-C(Sx)-FS-Z (SEQ ID NO: 3531), X-KKKTKKKRPQRAES*N-C(Sx)-FA-Z (SEQ ID NO: 3532), X-KKKTKKKRPQRAES*N-C(Sx)-FS-Z (SEQ ID NO: 3533), X-KKKTKKKRPQRAESD-C(Sx)-FS*-Z (SEQ ID NO: 3534), X-KTKTKKKRPQRAESN-C(Sx)-FS*-Z (SEQ ID NO: 3535), X-KKKTKKKRPQRAHS*D-C(Sx)-FA-Z (SEQ ID NO: 3536), X-KKKTKKKRPQRAHS*D-C(Sx)-FS-Z (SEQ ID NO: 3537), X-KKKTKKKRPQRAHS*N-C(Sx)-FA-Z (SEQ ID NO: 3538), X-K KTKKKRPQRAHS*N-C(Sx)-FS-Z (SEQ ID NO: 3539), X-KKKTKKKRPQRAHSD-C(Sx)-FS*-Z (SEQ ID NO: 3540), X-KKKTKKKRPQRAHSN-C(Sx)-FS*-Z (SEQ ID NO: 3541), X-KKKTKKKRPQRATS*D-C(Sx)-FA-Z (SEQ ID NO: 3542), X-KKKTKKKRPQRATS*D-C(Sx)-FS-Z (SEQ ID NO: 3543), X-KKKTKKKRPQRATS*N-C(Sx)-FA-Z (SEQ ID NO: 3544), X-KKKTKKKRPQRATS*N-C(Sx)-FS-Z (SEQ ID NO: 3545), X-KKKTKKKRPQRATSD-C(Sx)-FS*-Z (SEQ ID NO: 3546), X-KKKTKKKRPQRATSN-C(Sx)-FS*-Z (SEQ ID NO: 3547), X-KKKTPVVSVAT*P-C(Sx)-LPGQG-Z (SEQ ID NO: 3548), X-KKKTRKKRPQRADS*D-C(Sx)-FA-Z (SEQ ID NO: 3549), X-KKKTRKKRPQRADS*D-C(Sx)-FS-Z (SEQ ID NO: 3550), X-KKKTRKKRPQRADS*N-C(Sx)-FA-Z (SEQ ID NO: 3551), X-KKKTRKKRPQRADS*N-C(Sx)-FS-Z (SEQ ID NO: 3552), X-KKKTRKKRPQRADSD-C(Sx)-FS*-Z (SEQ ID NO: 3553), X-KKKTRKKRPQRADSN-C(Sx)-FS*-Z (SEQ ID NO: 3554), X-KKKTRKKRPQRAES*D-C(Sx)-FA-Z (SEQ ID NO: 3555), X-KKKTRKKRPQRAES*D-C(Sx)-FS-Z (SEQ ID NO: 3556), X-KKKTRKKRPQRAES*N-C(Sx)-FA-Z (SEQ ID NO: 3557), X-KKKTRKKRPQRAES*N-C(Sx)-FS-Z (SEQ ID NO: 3558), X-KKKTRKKRPQRAESD-C(Sx)-FS*-Z (SEQ ID NO: 3559), X-KKKTRKKRPQRAESN-C(Sx)-FS*-Z (SEQ ID NO: 3560), X-KKKTRKKRPQRAHS*D-C(Sx)-FA-Z (SEQ ID NO: 3561), X-KKKTRKKRPQRAHS*D-C(Sx)-FS-Z (SEQ ID NO: 3562), X-KKKTRKKRPQRAHS*N-C(Sx)-FA-Z (SEQ ID NO: 3563), X-KKKTRKKRPQRAHS*N-C(Sx)-FS-Z (SEQ ID NO: 3564), X-KKKTRKKRPQRAHSD-C(Sx)-FS*-Z (SEQ ID NO: 3565), X-KKKTRKKRPQRAHSN-C(Sx)-FS*-Z (SEQ ID NO: 3566), and X-KKKTRKKRPQRATS*D-C(Sx)-FA-Z (SEQ ID NO: 3567); wherein X is H or acetyl; and Z is OH or NH2.

[0155] In some embodiments, the metal-binding compound of the present invention is selected from the group consisting of: X-KKKTRKKRPQRATS*D-C(Sx)-FS-Z (SEQ ID NO: 3568), X-KKKTRKKRPQRATS*N-C(Sx)-FA-Z (SEQ ID NO: 3569), X-KKKTRKKRPQRATS*N-C(Sx)-FS-Z (SEQ ID NO: 3570), X-KKKTRKKRPQRATSD-C(Sx)-FS*-Z (SEQ ID NO: 3571), X-KKKTRKKRPQRATSN-C(Sx)-FS*-Z (SEQ ID NO: 3572), X-KKKTTGTKSNT*P-C(Sx)-SSVPS-Z (SEQ ID NO: 3573), X-KKKTTGTKSNTP-C(Sx)-SS*VPS-Z (SEQ ID NO: 3574), X-KKKTKKRPQRADS*D-C(Sx)-FA-Z (SEQ ID NO: 3575), X-KKKTTKKRPQRADS*D-C(Sx)-FS-Z (SEQ ID NO: 3576), X-KKKTTKKRPQRADS*N-C(Sx)-FA-Z (SEQ ID NO: 3577), X-KKKTTKKRPQRADS*N-C(Sx)-FS-Z (SEQ ID NO: 3578), X-KKKTTKKRPQRADSD-C(Sx)-FS*-Z (SEQ ID NO: 3579), X-KKKTTKKRPQRADSN-C(Sx)-FS*-Z (SEQ ID NO: 3580), X-KKKTKKRPQRAES*D-C(Sx)-FA-Z (SEQ ID NO: 3581), X-KKKITKKRPQRAES*D-C(Sx)-FS-Z (SEQ ID NO: 3582), X-KKKTKKRPQRAES*N-C(Sx)-FA-Z (SEQ ID NO: 3583), X-KKKTTKKRPQRAES*N-C(Sx)-FS-Z (SEQ ID NO: 3584), X-KKKTTKKRPQRAESD-C(Sx)-FS*-Z (SEQ ID NO: 3585), X-KKKTITKKRPQRAESN-C(Sx)-FS*-Z (SEQ ID NO: 3586), X-KKKTTKKRPQRAHS*D-C(Sx)-FA-Z (SEQ ID NO: 3587), X-KKKTTKKRPQRAHS*D-C(Sx)-FS-Z (SEQ ID NO: 3588), X-KKKTTKKRPQRAHS*N-C(Sx)-FA-Z (SEQ ID NO: 3589), X-KKKTTKKRPQRAHS*N-C(Sx)-FS-Z (SEQ ID NO: 3590), X-KKKTKKRPQRAHSD-C(Sx)-FS*-Z (SEQ ID NO: 3591), X-KKKTTKKRPQRAHSN-C(Sx)-FS*-Z (SEQ ID NO: 3592), X-KKKTTKKRPQRATS*D-C(Sx)-FA-Z (SEQ ID NO: 3593), X-KKKITKKRPQRATS*D-C(Sx)-FS-Z (SEQ ID NO: 3594), X-KKKTKKRPQRATS*N-C(Sx)-FA-Z (SEQ ID NO: 3595), X-KKKTKKRPQRATS*N-C(Sx)-FS-Z (SEQ ID NO: 3596), X-KKKTTKKRPQRATSD-C(Sx)-FS*-Z (SEQ ID NO: 3597), X-KKKTKKRPQRATSN-C(Sx)-FS*-Z (SEQ ID NO: 3598), X-KKKTQNALQT*P-C(Sx)-YTPYY-Z (SEQ ID NO: 3599), X-KKKTTQNALQTP-C(Sx)-YT*PYY-Z (SEQ ID NO: 3600), X-KKKTTSSTPSS*P-C(Sx)-PFPTS-Z (SEQ ID NO: 3601), X-KKKTVKKRPQRADS*D-C(Sx)-FA-Z (SEQ ID NO: 3602), X-KKKTVKKRPQRADS*D-C(Sx)-FS-Z (SEQ ID NO: 3603), X-KKKTVKKRPQRADS*N-C(Sx)-FA-Z (SEQ ID NO: 3604), X-KKKTVKKRPQRADS*N-C(Sx)-FS-Z (SEQ ID NO: 3605), X-KKKTVKKRPQRADSD-C(Sx)-FS*-Z (SEQ ID NO: 3606), X-KKKTVKKRPQRADSN-C(Sx)-FS*-Z (SEQ ID NO: 3607), X-KKKTVKKRPQRAES*D-C(Sx)-FA-Z (SEQ ID NO: 3608), X-KKKTVKKRPQRAES*D-C(Sx)-FS-Z (SEQ ID NO: 3609), X-KKKTVKKRPQRAES*N-C(Sx)-FA-Z (SEQ ID NO: 3610), X-KKKTVKKRPQRAES*N-C(Sx)-FS-Z (SEQ ID NO: 3611), X-KKKTVKKRPQRAESD-C(Sx)-FS*-Z (SEQ ID NO: 3612), X-KKKTVKKRPQRAESN-C(Sx)-FS*-Z (SEQ ID NO: 3613), X-KKKTVKKRPQRAHS*D-C(Sx)-FA-Z (SEQ ID NO: 3614), X-KKKTVKKRPQRAHS*D-C(Sx)-FS-Z (SEQ ID NO: 3615), X-KKKTVKKRPQRAHS*N-C(Sx)-FA-Z (SEQ ID NO: 3616), X-KKKTVKKRPQRAHS*N-C(Sx)-FS-Z (SEQ ID NO: 3617), X-KKKTVKKRPQRAHSD-C(Sx)-FS*-Z (SEQ ID NO: 3618), X-KKKTVKKRPQRAHSN-C(Sx)-FS*-Z (SEQ ID NO: 3619), X-KKKTVKKRPQRATS*D-C(Sx)-FA-Z (SEQ ID NO: 3620), X-KKKTVKKRPQRATS*D-C(Sx)-FS-Z (SEQ ID NO: 3621), X-KKKTVKKRPQRATS*N-C(Sx)-FA-Z (SEQ ID NO: 3622), X-KKKTVKKRPQRATS*N-C(Sx)-FS-Z (SEQ ID NO: 3623), X-KKKTVKKRPQRATSD-C(Sx)-FS*-Z (SEQ ID NO: 3624), X-KKKTVKKRPQRATSN-C(Sx)-FS*-Z (SEQ ID NO: 3625), and X-KKKTVNQSLLS*P-C(Sx)-VLEVD-Z (SEQ ID NO: 3626); wherein X— is H or acetyl; and Z is OH or NH2.

[0156] In some embodiments, the metal-binding compound of the present invention is selected from the group consisting of: X-KKKVLTQ[Nle]GSPS*I-C(Sx)-SS[pS]VS-Z (SEQ ID NO: 3627), X-KKKVLTQ[Nle]GSPSI-C(Sx)-SS*[pS]VS-Z (SEQ ID NO: 3628), X-KKKVPNGA-C(Sx)-SS*PVGNGFV-Z (SEQ ID NO: 3629), X-KKKVPNGAGSS*P-C(Sx)-GNGFV-Z (SEQ ID NO: 3630), X-KKKVSGQLID[Nle]M-C(Sx)-NS*FVGTRSY-Z (SEQ ID NO: 3631), X-KKKVSGQLIDAM-C(Sx)-NS*FVGTRSY-Z (SEQ ID NO: 3632), X-KKKVSGQLIDDM-C(Sx)-NS*FVGTRSY-Z (SEQ ID NO: 3633), X-KKKVSGQLIDEM-C(Sx)-NS*FVGTRSY-Z (SEQ ID NO: 3634), X-KKKVSGQLIDFM-C(Sx)-NS*FVGTRSY-Z (SEQ ID NO: 3635), X-KKKVSGQLIDGM-C(Sx)-NS*FVGTRSY-Z (SEQ ID NO: 3636), X-KKKVSGQLIDHM-C(Sx)-NS*FVGTRSY-Z (SEQ ID NO: 3637), X-KKKVSGQLIDIM-C(Sx)-NS*FVGTRSY-Z (SEQ ID NO: 3638), X-KKKVSGQLIDKM-C(Sx)-NS*FVGTRSY-Z (SEQ ID NO: 3639), X-KKKVSGQLIDLM-C(Sx)-NS*FVGTRSY-Z (SEQ ID NO: 3640), X-KKKVSGQLIDMM-C(Sx)-NS*FVGTRSY-Z (SEQ ID NO: 3641), X-KKKVSGQLIDNM-C(Sx)-NS*FVGTRSY-Z (SEQ ID NO: 3642), X-KKKVSGQLIDPM-C(Sx)-NS*FVGTRSY-Z (SEQ ID NO: 3643), X-KKKVSGQLIDQM-C(Sx)-NS*FVGTRSY-Z (SEQ ID NO: 3644), X-KKKVSGQLIDRM-C(Sx)-NS*FVGTRSY-Z (SEQ ID NO: 3645), X-KKKVSGQLIDS*[Nle]-C(Sx)-NSFVGTRSY-Z (SEQ ID NO: 3646), X-KKKVSGQLIDS*[Nle]-C(Sx)-NSFVG-Z (SEQ ID NO: 3647), X-KKKVSGQLIDS*M-C(Sx)-NAFVGTRSY-Z (SEQ ID NO: 3648), X-KKKVSGQLIDS*M-C(Sx)-NDFVGTRSY-Z (SEQ ID NO: 3649), X-KKKVSGQLIDS*M-C(Sx)-NEFVGTRSY-Z (SEQ ID NO: 3650), X-KKKVSGQLIDS*M-C(Sx)-NFFVGTRSY-Z (SEQ ID NO: 3651), X-KKKVSGQLIDS*M-C(Sx)-NIFVGTRSY-Z (SEQ ID NO: 3652), X-KKKVSGQLIDS*M-C(Sx)-NPFVGTRSY-Z (SEQ ID NO: 3653), X-KKKVSGQLIDS*M-C(Sx)-NS*FVGTRSY-Z (SEQ ID NO: 3654), X-KKKVSGQLIDS*M-C(Sx)-NSFVGTRS-Z (SEQ ID NO: 3655), X-KKKVSGQLIDS[Nle]-C(Sx)-NS*FVGTRSY-Z (SEQ ID NO: 3656), X-KKKVSGQLIDS[Nle]-C(Sx)-NS*FVG-Z (SEQ ID NO: 3657), X-KKKVSGQLIDSMANS*F-C(Sx)-GTRSY-Z (SEQ ID NO: 1006), X-KKKVSGQLIDSMANSF-C(Sx)-GT*RSY-Z (SEQ ID NO: 1196), X-KKKVSGQLIDSM-C(Sx)-NS*FVGTRS-Z (SEQ ID NO: 3658), X-KKKVSGQLIDVM-C(Sx)-NS*FVGTRSY-Z (SEQ ID NO: 3659), X-KKKVSGQLIDWM-C(Sx)-NS*FVGTRSY-Z (SEQ ID NO: 3660), X-KKKVSRSGLYRSPS*[Nle]-C(Sx)-ENLNRPR-Z (SEQ ID NO: 3661), X-KKKVSRSGLYRSPS*M-C(Sx)-ENLNRP-Z (SEQ ID NO: 3662), X-KKKVSRSGLYRSPS*M-C(Sx)-ENLNR-Z (SEQ ID NO: 3663), X-KKLGEDQAEEISDDLL-C(Sx)-DS*LSDEDE-Z (SEQ ID NO: 3664), X-KKLGEDQAEEISDDLLEDS*L-C(Sx)-DEDE-Z (SEQ ID NO: 3665), X-KKLNR-C(Sx)-LS*FAEG-Z (SEQ ID NO: 3666), X-KKLNR-C(Sx)-LS*FAEPG-Z (SEQ ID NO: 3667), X-KKLPQRAT*S-C(Sx)-VFAMF-Z (SEQ ID NO: 3668), X-KKLSTPV-C(Sx)-LS*PGPQKP-Z (SEQ ID NO: 3669), X-KKLSTPVVLS*P-C(Sx)-PQKP-Z (SEQ ID NO: 3670), and X-KKLSTPVVLS*PG-C(Sx)-QKP-Z (SEQ ID NO: 3671); wherein X is H or acetyl; and Z is OH or NH2.

[0157] In some embodiments, the metal-binding compound of the present invention is selected from the group consisting of: X-KKNPQRAT*S-C(Sx)-VFAMF-Z (SEQ ID NO: 3672), X-KKNVH[Nle]V-C(Sx)-TT*LPVDSRKK-Z (SEQ ID NO: 3673), X-KKPPQRAT*S-C(Sx)-VFAMF-Z (SEQ ID NO: 3674), X-KKPSVNPSIS*P-C(Sx)-HGVAR-Z (SEQ ID NO: 3675), X-KKQPQRAT*S-C(Sx)-VFAMF-Z (SEQ ID NO: 3676), X-KKR[Nle]QRAT*S-C(Sx)-VFAMF-Z (SEQ ID NO: 3677), X-KKRAA-C(Sx)-AT*SDVFA-Z (SEQ ID NO: 3678), X-KKRAARAT*S-C(Sx)-VFA-Z (SEQ ID NO: 3679), X-KKRAARATS*D-C(Sx)-FA-Z (SEQ ID NO: 3680), X-KKRAAR-C(Sx)-TS*DVFA-Z (SEQ ID NO: 3681), X-KKRDQRAT*S-C(Sx)-VFAMF-Z (SEQ ID NO: 3682), X-KKREQRAT*S-C(Sx)-VFAMF-Z (SEQ ID NO: 3683), X-KKRFQRAT*S-C(Sx)-VFAMF-Z (SEQ ID NO: 3684), X-KKRGQRAT*S-C(Sx)-VFAMF-Z (SEQ ID NO: 3685), X-KKRHQRAT*S-C(Sx)-VFAMF-Z (SEQ ID NO: 3686), X-KKRIQRAT*S-C(Sx)-VFAMF-Z (SEQ ID NO: 3687), X-KKRKQRAT*S-C(Sx)-VFAMF-Z (SEQ ID NO: 3688), X-KKRLQRAT*S-C(Sx)-VFAMF-Z (SEQ ID NO: 3689), X-KKRNQRAT*S-C(Sx)-VFAMF-Z (SEQ ID NO: 3690), X-KKRP[Nle]RAT*S-C(Sx)-VFAMF-Z (SEQ ID NO: 3691), X-KKRPDRAT*S-C(Sx)-VFAMF-Z (SEQ ID NO: 3692), X-KKRPERAT*S-C(Sx)-VFAMF-Z (SEQ ID NO: 3693), X-KKRPFRAT*S-C(Sx)-VFAMF-Z (SEQ ID NO: 3694), X-KKRPGRAT*S-C(Sx)-VFAMF-Z (SEQ ID NO: 3695), X-KKRPHRAT*S-C(Sx)-VFAMF-Z (SEQ ID NO: 3696), X-KKRPIRAT*S-C(Sx)-VFAMF-Z (SEQ ID NO: 3697), X-KKRPKRAT*S-C(Sx)-VFAMF-Z (SEQ ID NO: 3698), X-KKRPLRAT*S-C(Sx)-VFAMF-Z (SEQ ID NO: 3699), X-KKRPNRAT*S-C(Sx)-VFAMF-Z (SEQ ID NO: 3700), X-KKRPPRAT*S-C(Sx)-VFAMF-Z (SEQ ID NO: 3701), X-KKRPQ[Nle]AT*S-C(Sx)-VFAMF-Z (SEQ ID NO: 3702), X-KKRPQDAT*S-C(Sx)-VFAMF-Z (SEQ ID NO: 3703), X-KKRPQEAT*S-C(Sx)-VFAMF-Z (SEQ ID NO: 3704), X-KKRPQFAT*S-C(Sx)-VFAMF-Z (SEQ ID NO: 3705), X-KKRPQGAT*S-C(Sx)-VFAMF-Z (SEQ ID NO: 3706), X-KKRPQHAT*S-C(Sx)-VFAMF-Z (SEQ ID NO: 3707), X-KKRPQIAT*S-C(Sx)-VFAMF-Z (SEQ ID NO: 3708), X-KKRPQKAT*S-C(Sx)-VFAMF-Z (SEQ ID NO: 3709), X-KKRPQLAT*S-C(Sx)-VFAMF-Z (SEQ ID NO: 3710), X-KKRPQNAT*S-C(Sx)-VFAMF-Z (SEQ ID NO: 3711), X-KKRPQPAT*S-C(Sx)-VFAMF-Z (SEQ ID NO: 3712), X-KKRPQQAT*S-C(Sx)-VFAMF-Z (SEQ ID NO: 3713), X-KKRPQR[Nle]T*S-C(Sx)-VFAMF-Z (SEQ ID NO: 3714), X-KKRPQRAT*[Nle]-C(Sx)-VFAMF-Z (SEQ ID NO: 3715), X-KKRPQRAT*D-C(Sx)-VFAMF-Z (SEQ ID NO: 3716), X-KKRPQRAT*E-C(Sx)-VFAMF-Z (SEQ ID NO: 3717), X-KKRPQRAT*F-C(Sx)-VFAMF-Z (SEQ ID NO: 3718), X-KKRPQRAT*G-C(Sx)-VFAMF-Z (SEQ ID NO: 3719), X-KKRPQRAT*H-C(Sx)-VFAMF-Z (SEQ ID NO: 3720), X-KKRPQRAT*I-C(Sx)-VFAMF-Z (SEQ ID NO: 3721), X-KKRPQRAT*K-C(Sx)-VFAMF-Z (SEQ ID NO: 3722), X-KKRPQRAT*L-C(Sx)-VFAMF-Z (SEQ ID NO: 3723), X-KKRPQRAT*N-C(Sx)-VFAMF-Z (SEQ ID NO: 3724), X-KKRPQRAT*P-C(Sx)-VFAMF-Z (SEQ ID NO: 3725), X-KKRPQRAT*Q-C(Sx)-VFAMF-Z (SEQ ID NO: 3726), and X-KKRPQRAT*R-C(Sx)-VFAMF-Z (SEQ ID NO: 3727); wherein X— is H or acetyl; and Z is OH or NH2.

[0158] In some embodiments, the metal-binding compound of the present invention is selected from the group consisting of: X-KKRPQRAT*S-C(Sx)-[Nle]FAMF-Z (SEQ ID NO: 3728), X-KKRPQRAT*S-C(Sx)-DFAMF-Z (SEQ ID NO: 3729), X-KKRPQRAT*S-C(Sx)-EFAMF-Z (SEQ ID NO: 3730), X-KKRPQRAT*S-C(Sx)-FFAMF-Z (SEQ ID NO: 3731), X-KKRPQRAT*S-C(Sx)-GFAMF-Z (SEQ ID NO: 3732), X-KKRPQRAT*S-C(Sx)-HFAMF-Z (SEQ ID NO: 3733), X-KKRPQRAT*S-C(Sx)-IFAMF-Z (SEQ ID NO: 3734), X-KKRPQRAT*S-C(Sx)-KFAMF-Z (SEQ ID NO: 3735), X-KKRPQRAT*S-C(Sx)-LFAMF-Z (SEQ ID NO: 3736), X-KKRPQRAT*S-C(Sx)-NFAMF-Z (SEQ ID NO: 3737), X-KKRPQRAT*S-C(Sx)-PFAMF-Z (SEQ ID NO: 3738), X-KKRPQRAT*S-C(Sx)-QFAMF-Z (SEQ ID NO: 3739), X-KKRPQRAT*S-C(Sx)-RFAMF-Z (SEQ ID NO: 3740), X-KKRPQRAT*S-C(Sx)-V[Nle]AMF-Z (SEQ ID NO: 3741), X-KKRPQRAT*S-C(Sx)-VDAMF-Z (SEQ ID NO: 3742), X-KKRPQRAT*S-C(Sx)-VEAMF-Z (SEQ ID NO: 3743), X-KKRPQRAT*S-C(Sx)-VF[Nle]MF-Z (SEQ ID NO: 3744), X-KKRPQRAT*S-C(Sx)-VFADF-Z (SEQ ID NO: 3745), X-KKRPQRAT*S-C(Sx)-VFAEF-Z (SEQ ID NO: 3746), X-KKRPQRAT*S-C(Sx)-VFAFF-Z (SEQ ID NO: 3747), X-KKRPQRAT*S-C(Sx)-VFAGF-Z (SEQ ID NO: 3748), X-KKRPQRAT*S-C(Sx)-VFAHF-Z (SEQ ID NO: 3749), X-KKRPQRAT*S-C(Sx)-VFAIF-Z (SEQ ID NO: 3750), X-KKRPQRAT*S-C(Sx)-VFAKF-Z (SEQ ID NO: 3751), X-KKRPQRAT*S-C(Sx)-VFALF-Z (SEQ ID NO: 3752), X-KKRPQRAT*S-C(Sx)-VFAM[Nle]-Z (SEQ ID NO: 3753), X-KKRPQRAT*S-C(Sx)-VFAMD-Z (SEQ ID NO: 3754), X-KKRPQRAT*S-C(Sx)-VFAME-Z (SEQ ID NO: 3755), X-KKRPQRAT*S-C(Sx)-VFAMG-Z (SEQ ID NO: 3756), X-KKRPQRAT*S-C(Sx)-VFAMH-Z (SEQ ID NO: 3757), X-KKRPQRAT*S-C(Sx)-VFAMI-Z (SEQ ID NO: 3758), X-KKRPQRAT*S-C(Sx)-VFAMK-Z (SEQ ID NO: 3759), X-KKRPQRAT*S-C(Sx)-VFAML-Z (SEQ ID NO: 3760), X-KKRPQRAT*S-C(Sx)-VFAMN-Z (SEQ ID NO: 3761), X-KKRPQRAT*S-C(Sx)-VFAMP-Z (SEQ ID NO: 3762), X-KKRPQRAT*S-C(Sx)-VFAMQ-Z (SEQ ID NO: 3763), X-KKRPQRAT*S-C(Sx)-VFAMR-Z (SEQ ID NO: 3764), X-KKRPQRAT*S-C(Sx)-VFAMV-Z (SEQ ID NO: 3765), X-KKRPQRAT*S-C(Sx)-VFAMW-Z (SEQ ID NO: 3766), X-KKRPQRAT*S-C(Sx)-VFANF-Z (SEQ ID NO: 3767), X-KKRPQRAT*S-C(Sx)-VFAPF-Z (SEQ ID NO: 3768), X-KKRPQRAT*S-C(Sx)-VFAQF-Z (SEQ ID NO: 3769), X-KKRPQRAT*S-C(Sx)-VFARF-Z (SEQ ID NO: 3770), X-KKRPQRAT*S-C(Sx)-VFAVF-Z (SEQ ID NO: 3771), X-KKRPQRAT*S-C(Sx)-VFAWF-Z (SEQ ID NO: 3772), X-KKRPQRAT*S-C(Sx)-VFDMF-Z (SEQ ID NO: 3773), X-KKRPQRAT*S-C(Sx)-VFEMF-Z (SEQ ID NO: 3774), X-KKRPQRAT*S-C(Sx)-VFFMF-Z (SEQ ID NO: 3775), X-KKRPQRAT*S-C(Sx)-VFGMF-Z (SEQ ID NO: 3776), X-KKRPQRAT*S-C(Sx)-VFHMF-Z (SEQ ID NO: 3777), X-KKRPQRAT*S-C(Sx)-VFIMF-Z (SEQ ID NO: 3778), X-KKRPQRAT*S-C(Sx)-VFKMF-Z (SEQ ID NO: 3779), X-KKRPQRAT*S-C(Sx)-VFLMF-Z (SEQ ID NO: 3780), X-KKRPQRAT*S-C(Sx)-VFNMF-Z (SEQ ID NO: 3781), X-KKRPQRAT*S-C(Sx)-VFPMF-Z (SEQ ID NO: 3782), X-KKRPQRAT*S-C(Sx)-VFQMF-Z (SEQ ID NO: 3783), X-KKRPQRAT*S-C(Sx)-VFRMF-Z (SEQ ID NO: 3784), X-KKRPQRAT*S-C(Sx)-VFVMF-Z (SEQ ID NO: 3785), X-KKRPQRAT*S-C(Sx)-VFWMF-Z (SEQ ID NO: 3786), X-KKRPQRAT*S-C(Sx)-VGAMF-Z (SEQ ID NO: 3787), X-KKRPQRAT*S-C(Sx)-VHAMF-Z (SEQ ID NO: 3788), X-KKRPQRAT*S-C(Sx)-VIAMF-Z (SEQ ID NO: 3789), X-KKRPQRAT*S-C(Sx)-VKAMF-Z (SEQ ID NO: 3790), X-KKRPQRAT*S-C(Sx)-VLAMF-Z (SEQ ID NO: 3791), X-KKRPQRAT*S-C(Sx)-VNAMF-Z (SEQ ID NO: 3792), X-KKRPQRAT*S-C(Sx)-VPAMF-Z (SEQ ID NO: 3793), X-KKRPQRAT*S-C(Sx)-VQAMF-Z (SEQ ID NO: 3794), X-KKRPQRAT*S-C(Sx)-VRAMF-Z (SEQ ID NO: 3795), X-KKRPQRAT*S-C(Sx)-VVAMF-Z (SEQ ID NO: 3796), X-KKRPQRAT*S-C(Sx)-VWAMF-Z (SEQ ID NO: 3797), X-KKRPQRAT*S-C(Sx)-WFAMF-Z (SEQ ID NO: 3798), X-KKRPQRAT*V-C(Sx)-VFAMF-Z (SEQ ID NO: 3799), and X-KKRPQRAT*W-C(Sx)-VFAMF-Z (SEQ ID NO: 3800); wherein X is H or acetyl; and Z is OH or NH2.

[0159] In some embodiments, the metal-binding compound of the present invention is selected from the group consisting of: X-KKRPQR-C(Sx)-YS*NVF-Z (SEQ ID NO: 3801), X-KKRPQRDT*S-C(Sx)-VFAMF-Z (SEQ ID NO: 3802), X-KKRPQRET*S-C(Sx)-VFAMF-Z (SEQ ID NO: 3803), X-KKRPQRFT*S-C(Sx)-VFAMF-Z (SEQ ID NO: 3804), X-KKRPQRGT*S-C(Sx)-VFAMF-Z (SEQ ID NO: 3805), X-KKRPQRHT*S-C(Sx)-VFAMF-Z (SEQ ID NO: 3806), X-KKRPQRIT*S-C(Sx)-VFAMF-Z (SEQ ID NO: 3807), X-KKRPQRKT*S-C(Sx)-VFAMF-Z (SEQ ID NO: 3808), X-KKRPQRLT*S-C(Sx)-VFAMF-Z (SEQ ID NO: 3809), X-KKRPQRNT*S-C(Sx)-VFAMF-Z (SEQ ID NO: 3810), X-KKRPQRPT*S-C(Sx)-VFAMF-Z (SEQ ID NO: 3811), X-KKRPQRQT*S-C(Sx)-VFAMF-Z (SEQ ID NO: 3812), X-KKRPQRRT*S-C(Sx)-VFAMF-Z (SEQ ID NO: 3813), X-KKRPQRRYS*N-C(Sx)-F-Z (SEQ ID NO: 3814), X-KKRPQRVT*S-C(Sx)-VFAMF-Z (SEQ ID NO: 3815), X-KKRPQRWT*S-C(Sx)-VFAMF-Z (SEQ ID NO: 3816), X-KKRPQVAT*S-C(Sx)-VFAMF-Z (SEQ ID NO: 3817), X-KKRPQWAT*S-C(Sx)-VFAMF-Z (SEQ ID NO: 3818), X-KKRPRRAT*S-C(Sx)-VFAMF-Z (SEQ ID NO: 3819), X-KKRPVRAT*S-C(Sx)-VFAMF-Z (SEQ ID NO: 3820), X-KKRPWRAT*S-C(Sx)-VFAMF-Z (SEQ ID NO: 3821), X-KKRQQRAT*S-C(Sx)-VFAMF-Z (SEQ ID NO: 3822), X-KKRRQRAT*S-C(Sx)-VFAMF-Z (SEQ ID NO: 3823), X-KKRVQRAT*S-C(Sx)-VFAMF-Z (SEQ ID NO: 3824), X-KKRWQRAT*S-C(Sx)-VFAMF-Z (SEQ ID NO: 3825), X-KKS*R-C(Sx)-DY[Nle]T[Nle]QIG-Z (SEQ ID NO: 3826), X-KKVPQRAT*S-C(Sx)-VFAMF-Z (SEQ ID NO: 3827), X-KKVSRSGLYRSPS*[Nle]-C(Sx)-ENLNRP-Z (SEQ ID NO: 3828), X-KKVSRSGLYRSPS*[Nle]-C(Sx)-ENLNR-Z (SEQ ID NO: 3829), X-KKVSRSGLYRSPS*M-C(Sx)-ENLNRPR-Z (SEQ ID NO: 3830), X-KKVSRSGLYRSPS*M-C(Sx)-ENLNRP-Z (SEQ ID NO: 3831), X-KKVSRSGLYRSPS*M-C(Sx)-ENLNR-Z (SEQ ID NO: 3832), X-KKWPQRAT*S-C(Sx)-VFAMF-Z (SEQ ID NO: 3833), X-KLKTTKKRPQRATS*N-C(Sx)-FS-Z (SEQ ID NO: 3834), X-KLKTTKKRPQRATSN-C(Sx)-FS*-Z (SEQ ID NO: 3835), X-KLLR-C(Sx)-SS*RRIRR-Z (SEQ ID NO: 3836), X-KLPWWR-C(Sx)-YT*WVVERDVNTKQR-Z (SEQ ID NO: 3837), X-KLRPQRAT*S-C(Sx)-VFAMF-Z (SEQ ID NO: 3838), X-KNDG-C(Sx)-RT*RSKGTLRYMSPE-Z (SEQ ID NO: 3839), X-KNDGKRT*R-C(Sx)-KGTLRYMSPE-Z (SEQ ID NO: 3840), X-KNDGKRTRS-C(Sx)-GT*LRYMSPE-Z (SEQ ID NO: 3841), X-KNDGKRTRSKGT*L-C(Sx)-YMSPE-Z (SEQ ID NO: 3842), X-KNIVT-C(Sx)-RT*PPPSQGK-Z (SEQ ID NO: 1059), X-KNIVTPRT*P-C(Sx)-PSQGK-Z (SEQ ID NO: 1058), X-KNIVTPRTP-C(Sx)-PS*QGK-Z (SEQ ID NO: 3843), X-KNKTTKKRPQRATS*N-C(Sx)-FS-Z (SEQ ID NO: 3844), -KNKTTKKRPQRATSN-C(Sx)-FS*-Z (SEQ ID NO: 3845); wherein X— is H or acetyl; and Z is OH or NH2.

[0160] In some embodiments, the metal-binding compound of the present invention is selected from the group consisting of: X-KNRPQRAT*S-C(Sx)-VFAMF-Z (SEQ ID NO: 3846), X-KPARKKRYT*V-C(Sx)-GNPYWM-Z (SEQ ID NO: 3847), X-KPKKKKKRPQRADS*D-C(Sx)-FA-Z (SEQ ID NO: 3848), X-KPKKKKKRPQRADS*D-C(Sx)-FS-Z (SEQ ID NO: 3849), X-KPKKKKKRPQRADS*N-C(Sx)-FA-Z (SEQ ID NO: 3850), X-KPKKKKKRPQRADS*N-C(Sx)-FS-Z (SEQ ID NO: 3851), X-KPKKKKKRPQRADSD-C(Sx)-FS*-Z (SEQ ID NO: 3852), X-KPKKKKKRPQRADSN-C(Sx)-FS*-Z (SEQ ID NO: 3853), X-KPKKKKKRPQRAES*D-C(Sx)-FA-Z (SEQ ID NO: 3854), X-KPKKKKKRPQRAES*D-C(Sx)-FS-Z (SEQ ID NO: 3855), X-KPKKKKKRPQRAES*N-C(Sx)-FA-Z (SEQ ID NO: 3856), X-KPKKKKKRPQRAES*N-C(Sx)-FS-Z (SEQ ID NO: 3857), X-KPKKKKKRPQRAESD-C(Sx)-FS*-Z (SEQ ID NO: 3858), X-KPKKKKKRPQRAESN-C(Sx)-FS*-Z (SEQ ID NO: 3859), X-KPKKKKKRPQRAHS*D-C(Sx)-FA-Z (SEQ ID NO: 3860), X-KPKKKKKRPQRAHS*D-C(Sx)-FS-Z (SEQ ID NO: 3861), X-KPKKKKKRPQRAHS*N-C(Sx)-FA-Z (SEQ ID NO: 3862), X-KPKKKKKRPQRAHS*N-C(Sx)-FS-Z (SEQ ID NO: 3863), X-KPKKKKKRPQRAHSD-C(Sx)-FS*-Z (SEQ ID NO: 3864), X-KPKKKKKRPQRAHSN-C(Sx)-FS*-Z (SEQ ID NO: 3865), X-KPKKKKKRPQRATS*D-C(Sx)-FA-Z (SEQ ID NO: 3866), X-KPKKKKKRPQRATS*D-C(Sx)-FS-Z (SEQ ID NO: 3867), X-KPKKKKKRPQRATS*N-C(Sx)-FA-Z (SEQ ID NO: 3868), X-KPKKKKKRPQRATS*N-C(Sx)-FS-Z (SEQ ID NO: 3869), X-KPKKKKKRPQRATSD-C(Sx)-FS*-Z (SEQ ID NO: 3870), X-KPKKKKKRPQRATSN-C(Sx)-FS*-Z (SEQ ID NO: 3871), X-KPKKRKKRPQRADS*D-C(Sx)-FA-Z (SEQ ID NO: 3872), X-KPKKRKKRPQRADS*D-C(Sx)-FS-Z (SEQ ID NO: 3873), X-KPKKRKKRPQRADS*N-C(Sx)-FA-Z (SEQ ID NO: 3874), X-KPKKRKKRPQRADS*N-C(Sx)-FS-Z (SEQ ID NO: 3875), X-KPKKRKKRPQRADSD-C(Sx)-FS*-Z (SEQ ID NO: 3876), X-KPKKRKKRPQRADSN-C(Sx)-FS*-Z (SEQ ID NO: 3877), X-KPKKRKKRPQRAES*D-C(Sx)-FA-Z (SEQ ID NO: 3878), X-KPKKRKKRPQRAES*D-C(Sx)-FS-Z (SEQ ID NO: 3879), X-KPKKRKKRPQRAES*N-C(Sx)-FA-Z (SEQ ID NO: 3880), X-KPKKRKKRPQRAES*N-C(Sx)-FS-Z (SEQ ID NO: 3881), X-KPKKRKKRPQRAESD-C(Sx)-FS*-Z (SEQ ID NO: 3882), X-KPKKRKKRPQRAESN-C(Sx)-FS*-Z (SEQ ID NO: 3883), X-KPKKRKKRPQRAHS*D-C(Sx)-FA-Z (SEQ ID NO: 3884), X-KPKKRKKRPQRAHS*D-C(Sx)-FS-Z (SEQ ID NO: 3885), X-KPKKRKKRPQRAHS*N-C(Sx)-FA-Z (SEQ ID NO: 3886), X-KPKKRKKRPQRAHS*N-C(Sx)-FS-Z (SEQ ID NO: 3887), X-KPKKRKKRPQRAHSD-C(Sx)-FS*-Z (SEQ ID NO: 3888), X-KPKKRKKRPQRAHSN-C(Sx)-FS*-Z (SEQ ID NO: 3889), X-KPKKRKKRPQRATS*D-C(Sx)-FA-Z (SEQ ID NO: 3890), X-KPKKRKKRPQRATS*D-C(Sx)-FS-Z (SEQ ID NO: 3891), and X-KPKKRKKRPQRATS*N-C(Sx)-FA-Z (SEQ ID NO: 3892); wherein X is H or acetyl; and Z is OH or NH2.

[0161] In some embodiments, the metal-binding compound of the present invention is selected from the group consisting of: X-KPKKRKKRPQRATS*N-C(Sx)-FS-Z (SEQ ID NO: 3893), X-KPKKRKKRPQRATSD-C(Sx)-FS*-Z (SEQ ID NO: 3894), X-KPKKRKKRPQRATSN-C(Sx)-FS*-Z (SEQ ID NO: 3895), X-KPKKTKKRPQRADS*D-C(Sx)-FA-Z (SEQ ID NO: 3896), X-KPKKTKKRPQRADS*D-C(Sx)-FS-Z (SEQ ID NO: 3897), X-KPKKTKKRPQRADS*N-C(Sx)-FA-Z (SEQ ID NO: 3898), X-KPKKTKKRPQRADS*N-C(Sx)-FS-Z (SEQ ID NO: 3899), X-KPKKTKKRPQRADSD-C(Sx)-FS*-Z (SEQ ID NO: 3900), X-KPKKTKKRPQRADSN-C(Sx)-FS*-Z (SEQ ID NO: 3901), X-KPKKTKKRPQRAES*D-C(Sx)-FA-Z (SEQ ID NO: 3902), X-KPKKTKKRPQRAES*D-C(Sx)-FS-Z (SEQ ID NO: 3903), X-KPKKTKKRPQRAES*N-C(Sx)-FA-Z (SEQ ID NO: 3904), X-KPKKTKKRPQRAES*N-C(Sx)-FS-Z (SEQ ID NO: 3905), X-KPKKTKKRPQRAESD-C(Sx)-FS*-Z (SEQ ID NO: 3906), X-KPKKTKKRPQRAESN-C(Sx)-FS*-Z (SEQ ID NO: 3907), X-KPKKTKKRPQRAHS*D-C(Sx)-FA-Z (SEQ ID NO: 3908), X-KPKKTKKRPQRAHS*D-C(Sx)-FS-Z (SEQ ID NO: 3909), X-KPKKTKKRPQRAHS*N-C(Sx)-FA-Z (SEQ ID NO: 3910), X-KPKKTKKRPQRAHS*N-C(Sx)-FS-Z (SEQ ID NO: 3911), X-KPKKTKKRPQRAHSD-C(Sx)-FS*-Z (SEQ ID NO: 3912), X-KPKKTKKRPQRAHSN-C(Sx)-FS*-Z (SEQ ID NO: 3913), X-KPKKTKKRPQRATS*D-C(Sx)-FA-Z (SEQ ID NO: 3914), X-KPKKTKKRPQRATS*D-C(Sx)-FS-Z (SEQ ID NO: 3915), X-KPKKTKKRPQRATS*N-C(Sx)-FA-Z (SEQ ID NO: 3916), X-KPKKTKKRPQRATS*N-C(Sx)-FS-Z (SEQ ID NO: 3917), X-KPKKTKKRPQRATSD-C(Sx)-FS*-Z (SEQ ID NO: 3918), X-KPKKTKKRPQRATSN-C(Sx)-FS*-Z (SEQ ID NO: 3919), X-KPKKVKKRPQRADS*D-C(Sx)-FA-Z (SEQ ID NO: 3920), X-KPKKVKKRPQRADS*D-C(Sx)-FS-Z (SEQ ID NO: 3921), X-KPKKVKKRPQRADS*N-C(Sx)-FA-Z (SEQ ID NO: 3922), X-KPKKVKKRPQRADS*N-C(Sx)-FS-Z (SEQ ID NO: 3923), X-KPKKVKKRPQRADSD-C(Sx)-FS*-Z (SEQ ID NO: 3924), X-KPKKVKKRPQRADSN-C(Sx)-FS*-Z (SEQ ID NO: 3925), X-KPKKVKKRPQRAES*D-C(Sx)-FA-Z (SEQ ID NO: 3926), X-KPKKVKKRPQRAES*D-C(Sx)-FS-Z (SEQ ID NO: 3927), X-KPKKVKKRPQRAES*N-C(Sx)-FA-Z (SEQ ID NO: 3928), X-KPKKVKKRPQRAES*N-C(Sx)-FS-Z (SEQ ID NO: 3929), X-KPKKVKKRPQRAESD-C(Sx)-FS*-Z (SEQ ID NO: 3930), X-KPKKVKKRPQRAESN-C(Sx)-FS*-Z (SEQ ID NO: 3931), X-KPKKVKKRPQRAHS*D-C(Sx)-FA-Z (SEQ ID NO: 3932), X-KPKKVKKRPQRAHS*D-C(Sx)-FS-Z (SEQ ID NO: 3933), X-KPKKVKKRPQRAHS*N-C(Sx)-FA-Z (SEQ ID NO: 3934), X-KPKKVKKRPQRAHS*N-C(Sx)-FS-Z (SEQ ID NO: 3935), X-KPKKVKKRPQRAHSD-C(Sx)-FS*-Z (SEQ ID NO: 3936), X-KPKKVKKRPQRAHSN-C(Sx)-FS*-Z (SEQ ID NO: 3937), X-KPKKVKKRPQRATS*D-C(Sx)-FA-Z (SEQ ID NO: 3938), X-KPKKVKKRPQRATS*D-C(Sx)-FS-Z (SEQ ID NO: 3939), X-KPKKVKKRPQRATS*N-C(Sx)-FA-Z (SEQ ID NO: 3940), X-KPKKVKKRPQRATS*N-C(Sx)-FS-Z (SEQ ID NO: 3941), X-KPKKVKKRPQRATSD-C(Sx)-FS*-Z (SEQ ID NO: 3942), X-KPKKVKKRPQRATSN-C(Sx)-FS*-Z (SEQ ID NO: 3943), and X-KPKTKKKRPQRADS*D-C(Sx)-FA-Z (SEQ ID NO: 3944); wherein X is H or acetyl; and Z is OH or NH2.

[0162] In some embodiments, the metal-binding compound of the present invention is selected from the group consisting of: X-KPKTKKKRPQRADS*D-C(Sx)-FS-Z (SEQ ID NO: 3945), X-KPKTKKKRPQRADS*N-C(Sx)-FA-Z (SEQ ID NO: 3946), X-KPKTKKKRPQRADS*N-C(Sx)-FS-Z (SEQ ID NO: 3947), X-KPKTKKKRPQRADSD-C(Sx)-FS*-Z (SEQ ID NO: 3948), X-KPKTKKKRPQRADSN-C(Sx)-FS*-Z (SEQ ID NO: 3949), X-KPKTKKKRPQRAES*D-C(Sx)-FA-Z (SEQ ID NO: 3950), X-KPKTKKKRPQRAES*D-C(Sx)-FS-Z (SEQ ID NO: 3951), X-KPKTKKKRPQRAES*N-C(Sx)-FA-Z (SEQ ID NO: 3952), X-KPKTKKKRPQRAES*N-C(Sx)-FS-Z (SEQ ID NO: 3953), X-KPKTKKKRPQRAESD-C(Sx)-FS*-Z (SEQ ID NO: 3954), X-KPKTKKKRPQRAESN-C(Sx)-FS*-Z (SEQ ID NO: 3955), X-KPKTKKKRPQRAHS*D-C(Sx)-FA-Z (SEQ ID NO: 3956), X-KPKTKKKRPQRAHS*D-C(Sx)-FS-Z (SEQ ID NO: 3957), X-KPKTKKKRPQRAHS*N-C(Sx)-FA-Z (SEQ ID NO: 3958), X-KPKTKKKRPQRAHS*N-C(Sx)-FS-Z (SEQ ID NO: 3959), X-KPKTKKKRPQRAHSD-C(Sx)-FS*-Z (SEQ ID NO: 3960), X-KPKTKKKRPQRAHSN-C(Sx)-FS*-Z (SEQ ID NO: 3961), X-KPKTKKKRPQRATS*D-C(Sx)-FA-Z (SEQ ID NO: 3962), X-KPKTKKKRPQRATS*D-C(Sx)-FS-Z (SEQ ID NO: 3963), X-KPKTKKKRPQRATS*N-C(Sx)-FA-Z (SEQ ID NO: 3964), X-KPKTKKKRPQRATS*N-C(Sx)-FS-Z (SEQ ID NO: 3965), X-KPKTKKKRPQRATSD-C(Sx)-FS*-Z (SEQ ID NO: 3966), X-KPKTKKKRPQRATSN-C(Sx)-FS*-Z (SEQ ID NO: 3967), X-KPKTRKKRPQRADS*D-C(Sx)-FA-Z (SEQ ID NO: 3968), X-KPKTRKKRPQRADS*D-C(Sx)-FS-Z (SEQ ID NO: 3969), X-KPKTRKKRPQRADS*N-C(Sx)-FA-Z (SEQ ID NO: 3970), X-KPKTRKKRPQRADS*N-C(Sx)-FS-Z (SEQ ID NO: 3971), X-KPKTRKKRPQRADSD-C(Sx)-FS*-Z (SEQ ID NO: 3972), and X-KPKTRKKRPQRADSN-C(Sx)-FS*-Z (SEQ ID NO: 3973); wherein X— is H or acetyl; and Z is OH or NH2.

[0163] In some embodiments, the metal-binding compound of the present invention is selected from the group consisting of: X-KPKTRKKRPQRAES*D-C(Sx)-FA-Z (SEQ ID NO: 3974), X-KPKTRKKRPQRAES*D-C(Sx)-FS-Z (SEQ ID NO: 3975), X-KPKTRKKRPQRAES*N-C(Sx)-FA-Z (SEQ ID NO: 3976), X-KPKTRKKRPQRAES*N-C(Sx)-FS-Z (SEQ ID NO: 3977), X-KPKTRKKRPQRAESD-C(Sx)-FS*-Z (SEQ ID NO: 3978), X-KPKTRKKRPQRAESN-C(Sx)-FS*-Z (SEQ ID NO: 3979), X-KPKTRKKRPQRAHS*D-C(Sx)-FA-Z (SEQ ID NO: 3980), X-KPKTRKKRPQRAHS*D-C(Sx)-FS-Z (SEQ ID NO: 3981), X-KPKTRKKRPQRAHS*N-C(Sx)-FA-Z (SEQ ID NO: 3982), X-KPKTRKKRPQRAHS*N-C(Sx)-FS-Z (SEQ ID NO: 3983), X-KPKTRKKRPQRAHSD-C(Sx)-FS*-Z (SEQ ID NO: 3984), X-KPKTRKKRPQRAHSN-C(Sx)-FS*-Z (SEQ ID NO: 3985), X-KPKTRKKRPQRATS*D-C(Sx)-FA-Z (SEQ ID NO: 3986), X-KPKTRKKRPQRATS*D-C(Sx)-FS-Z (SEQ ID NO: 3987), X-KPKTRKKRPQRATS*N-C(Sx)-FA-Z (SEQ ID NO: 3988), X-KPKTRKKRPQRATS*N-C(Sx)-FS-Z (SEQ ID NO: 3989), X-KPKTRKKRPQRATSD-C(Sx)-FS*-Z (SEQ ID NO: 3990), X-KPKTRKKRPQRATSN-C(Sx)-FS*-Z (SEQ ID NO: 3991), X-KPKTKKRPQRADS*D-C(Sx)-FA-Z (SEQ ID NO: 3992), X-KPKTTKKRPQRADS*D-C(Sx)-FS-Z (SEQ ID NO: 3993), X-KPKTITKKRPQRADS*N-C(Sx)-FA-Z (SEQ ID NO: 3994), X-KPKTTKKRPQRADS*N-C(Sx)-FS-Z (SEQ ID NO: 3995), X-KPKTTKKRPQRADSD-C(Sx)-FS*-Z (SEQ ID NO: 3996), X-KPKTTKKRPQRADSN-C(Sx)-FS*-Z (SEQ ID NO: 3997), X-KPKTRKKRPQRAES*D-C(Sx)-FA-Z (SEQ ID NO: 3998), X-KPKTKKRPQRAES*D-C(Sx)-FS-Z (SEQ ID NO: 3999), X-KPKTKKRPQRAES*N-C(Sx)-FA-Z (SEQ ID NO: 4000), X-KPKTTKKRPQRAES*N-C(Sx)-FS-Z (SEQ ID NO: 4001), X-KPKTTKKRPQRAESD-C(Sx)-FS*-Z (SEQ ID NO: 4002), X-KPKTFKKRPQRAESN-C(Sx)-FS*-Z (SEQ ID NO: 4003), X-KPKTITKKRPQRAHS*D-C(Sx)-FA-Z (SEQ ID NO: 4004), X-KPKTTKKRPQRAHS*D-C(Sx)-FS-Z (SEQ ID NO: 4005), X-KPKTITKKRPQRAHS*N-C(Sx)-FA-Z (SEQ ID NO: 4006), X-KPKTTKKRPQRAHS*N-C(Sx)-FS-Z (SEQ ID NO: 4007), X-KPKTTKKRPQRAHSD-C(Sx)-FS*-Z (SEQ ID NO: 4008), X-KPKTTKKRPQRAHSN-C(Sx)-FS*-Z (SEQ ID NO: 4009), X-KPKTTKKRPQRATS*D-C(Sx)-FA-Z (SEQ ID NO: 4010), X-KPKTKKRPQRATS*D-C(Sx)-FS-Z (SEQ ID NO: 4011), X-KPKTKKRPQRATS*N-C(Sx)-FA-Z (SEQ ID NO: 4012), X-KPKTRKKRPQRATS*N-C(Sx)-FS-Z (SEQ ID NO: 4013), X-KPKTTKKRPQRATSD-C(Sx)-FS*-Z (SEQ ID NO: 4014), X-KPKTFKKRPQRATSN-C(Sx)-FS*-Z (SEQ ID NO: 4015), X-KPKTVKKRPQRADS*D-C(Sx)-FA-Z (SEQ ID NO: 4016), X-KPKTVKKRPQRADS*D-C(Sx)-FS-Z (SEQ ID NO: 4017), X-KPKTVKKRPQRADS*N-C(Sx)-FA-Z (SEQ ID NO: 4018), X-KPKTVKKRPQRADS*N-C(Sx)-FS-Z (SEQ ID NO: 4019), X-KPKTVKKRPQRADSD-C(Sx)-FS*-Z (SEQ ID NO: 4020), X-KPKTVKKRPQRADSN-C(Sx)-FS*-Z (SEQ ID NO: 4021), X-KPKTVKKRPQRAES*D-C(Sx)-FA-Z (SEQ ID NO: 4022), X-KPKTVKKRPQRAES*D-C(Sx)-FS-Z (SEQ ID NO: 4023), X-KPKTVKKRPQRAES*N-C(Sx)-FA-Z (SEQ ID NO: 4024), X-KPKTVKKRPQRAES*N-C(Sx)-FS-Z (SEQ ID NO: 4025), X-KPKTVKKRPQRAESD-C(Sx)-FS*-Z (SEQ ID NO: 4026), X-KPKTVKKRPQRAESN-C(Sx)-FS*-Z (SEQ ID NO: 4027), X-KPKTVKKRPQRAHS*D-C(Sx)-FA-Z (SEQ ID NO: 4028), X-KPKTVKKRPQRAHS*D-C(Sx)-FS-Z (SEQ ID NO: 4029), X-KPKTVKKRPQRAHS*N-C(Sx)-FA-Z (SEQ ID NO: 4030), X-KPKTVKKRPQRAHS*N-C(Sx)-FS-Z (SEQ ID NO: 4031), X-KPKTVKKRPQRAHSD-C(Sx)-FS*-Z (SEQ ID NO: 4032), X-KPKTVKKRPQRAHSN-C(Sx)-FS*-Z (SEQ ID NO: 4033), X-KPKTVKKRPQRATS*D-C(Sx)-FA-Z (SEQ ID NO: 4034), X-KPKTVKKRPQRATS*D-C(Sx)-FS-Z (SEQ ID NO: 4035), X-KPKTVKKRPQRATS*N-C(Sx)-FA-Z (SEQ ID NO: 4036), X-KPKTVKKRPQRATS*N-C(Sx)-FS-Z (SEQ ID NO: 4037), X-KPKTVKKRPQRATSD-C(Sx)-FS*-Z (SEQ ID NO: 4038), X-KPKTVKKRPQRATSN-C(Sx)-FS*-Z (SEQ ID NO: 4039), X-KPRPQRAT*S-C(Sx)-VFAMF-Z (SEQ ID NO: 4040), X-KQREGFGRQS*M-C(Sx)-EKR-Z (SEQ ID NO: 4041), and X-KQRPQRAT*S-C(Sx)-VFAMF-Z (SEQ ID NO: 4042); wherein X— is H or acetyl; and Z is OH or NH2.

[0164] In some embodiments, the metal-binding compound of the present invention is selected from the group consisting of: X-KRKLP-C(Sx)-DT*PGQGLT-Z (SEQ ID NO: 1125), X-KRKTTKKRPQRATS*N-C(Sx)-FS-Z (SEQ ID NO: 4043), X-KRKTTKKRPQRATSN-C(Sx)-FS*-Z (SEQ ID NO: 4044), X-KRR-C(Sx)-AS*FRRR-Z (SEQ ID NO: 4045), X-KRRPQRAT*S-C(Sx)-VFAMF-Z (SEQ ID NO: 4046), X-KRRRLAS*L-C(Sx)-G-Z (SEQ ID NO: 4047), X-KRS*R-C(Sx)-SSFPPGTRK-Z (SEQ ID NO: 4048), X-KRSR-C(Sx)-SS*FPPGTRK-Z (SEQ ID NO: 4049), X-KS*N-C(Sx)-ESGDSQQPSQPSQ-Z (SEQ ID NO: 4050), X-KSN-C(Sx)-ES*GDSQQPSQPSQ-Z (SEQ ID NO: 4051), X-KSNEESGDS*Q-C(Sx)-PSQPSQQPSV-Z (SEQ ID NO: 4052), X-KSNEESGDSQ-C(Sx)-PS*QPSQQPSV-Z (SEQ ID NO: 4053), X-KSNEESGDSQQPSQPS*Q-C(Sx)-PSV-Z (SEQ ID NO: 4054), X-KSNEESGDSQQPSQPSQ-C(Sx)-PS*V-Z (SEQ ID NO: 4055), X-KTTKKRPQRATS*N-C(Sx)-FS-Z (SEQ ID NO: 1000), X-KTTKKRPQRATSN-C(Sx)-FS*-Z (SEQ ID NO: 4056), X-KVKTTKKRPQRATS*N-C(Sx)-FS-Z (SEQ ID NO: 4057), X-KVKTTKKRPQRATSN-C(Sx)-FS*-Z (SEQ ID NO: 4058), X-KVRPQRAT*S-C(Sx)-VFAMF-Z (SEQ ID NO: 4059), X-KVSRSGLYRSPS*[Nle]-C(Sx)-ENLNRP-Z (SEQ ID NO: 4060), X-KVSRSGLYRSPS*[Nle]-C(Sx)-ENLNR-Z (SEQ ID NO: 4061), X-KVSRSGLYRSPS*M-C(Sx)-ENLNRPR-Z (SEQ ID NO: 4062), X-KVSRSGLYRSPS*M-C(Sx)-ENLNRP-Z (SEQ ID NO: 4063), X-KVSRSGLYRSPS*M-C(Sx)-ENLNR-Z (SEQ ID NO: 4064), X-KWKTTKKRPQRATS*N-C(Sx)-FS-Z (SEQ ID NO: 4065), X-KWKTTKKRPQRATSN-C(Sx)-FS*-Z (SEQ ID NO: 4066), X-KWR[Nle][Nle][Nle]S*L-C(Sx)-QSRSSKS-Z (SEQ ID NO: 4067), X-KWR[Nle][Nle][Nle]SL-C(Sx)-QS*RSSKS-Z (SEQ ID NO: 4068), X-KWR[Nle][Nle]S*L-C(Sx)-QSRSSKS-Z (SEQ ID NO: 4069), X-KWR[Nle][Nle]SL-C(Sx)-QS*RSSKS-Z (SEQ ID NO: 4070), X-KWR-C(Sx)-[Nle]S*LSQSRSSKS-Z (SEQ ID NO: 4071), X-KWR-C(Sx)-MS*LSQSRSSKSAPE-Z (SEQ ID NO: 4072), X-KWR-C(Sx)-MS*LSQSRSSKS-Z (SEQ ID NO: 4073), X-KWRMMS*L-C(Sx)-QSRSSKS-Z (SEQ ID NO: 4074), X-KWRMMSL-C(Sx)-QS*RSSKS-Z (SEQ ID NO: 4075), X-KWRPQRAT*S-C(Sx)-VFAMF-Z (SEQ ID NO: 4076), X-LAGISRS*V-C(Sx)-VTVAY-Z (SEQ ID NO: 1083), X-LAKTTKKRPQRATS*N-C(Sx)-FS-Z (SEQ ID NO: 4077), and X-LAKTTKKRPQRATSN-C(Sx)-FS*-Z (SEQ ID NO: 4078); wherein X is H or acetyl; and Z is OH or NH2.

[0165] In some embodiments, the metal-binding compound of the present invention is selected from the group consisting of: X-LANPLMA-C(Sx)-GT*LTRRHQNGRF-Z (SEQ ID NO: 4079), X-LASFK[Nle]WS*K-C(Sx)-NNEEH-Z (SEQ ID NO: 4080), X-LASFK-C(Sx)-WS*KLNNEEH-Z (SEQ ID NO: 4081), X-L-C(Sx)-DS*LRRKAK-Z (SEQ ID NO: 4082), X-L-C(Sx)-LS*PGPF-Z (SEQ ID NO: 4083), X-LGGLRISS*D-C(Sx)-SSDIE-Z (SEQ ID NO: 1082), X-LGGLRISSD-C(Sx)-SS*DIE-Z (SEQ ID NO: 4084), X-LHQEDNDYI-C(Sx)-AS*LIK-Z (SEQ ID NO: 4085), X-LIDAT-C(Sx)-DT*PGAEDDE-Z (SEQ ID NO: 1043), X-LIDATGDT*P-C(Sx)-AEDDE-Z (SEQ ID NO: 1042), X-LIDATGDT*PG-C(Sx)-EDDE-Z (SEQ ID NO: 4086), X-LIDS*[Nle]-C(Sx)-NSFVGTRSYAKKK-Z (SEQ ID NO: 4087), X-LIDS[Nle]-C(Sx)-NS*FVGTRSYAKKK-Z (SEQ ID NO: 4088), X-LKKERLLDDRHDS*G-C(Sx)-DSMKDEEY-Z (SEQ ID NO: 4089), X-LKKERLLDDRHDSG-C(Sx)-DS*MKDEEY-Z (SEQ ID NO: 4090), X-LKKERLLDDRHDSGLDS*M-C(Sx)-DEEY-Z (SEQ ID NO: 4091), X-LKR-C(Sx)-AS*FKKFA-Z (SEQ ID NO: 4092), X-LKRPQRAT*S-C(Sx)-VFAMF-Z (SEQ ID NO: 4093), X-LLDDR-C(Sx)-DS*GLDSMKD-Z (SEQ ID NO: 4094), X-LLDDRHDS*G-C(Sx)-DSMKD-Z (SEQ ID NO: 4095), X-LLDDRHDSG-C(Sx)-DS*MKD-Z (SEQ ID NO: 4096), X-LLLR-C(Sx)-SS*RRIRR-Z (SEQ ID NO: 4097), X-LLPWWR-C(Sx)-YT*WVVERDVNTKQR-Z (SEQ ID NO: 4098), X-LLSNASAT*P-C(Sx)-GRRGR-Z (SEQ ID NO: 1072), X-LMLRLQDYE-C(Sx)-KT*KKA-Z (SEQ ID NO: 4099), X-LPGPPS*P-C(Sx)-SDAES-Z (SEQ ID NO: 1181), X-LQREGFGRQS*M-C(Sx)-EKR-Z (SEQ ID NO: 4100), X-LRELGQGS*F-C(Sx)-MVYEG-Z (SEQ ID NO: 4101), X-LRRAS*L-C(Sx)-AA-Z (SEQ ID NO: 4102), X-LRR-C(Sx)-AS*FRRR-Z (SEQ ID NO: 4103), X-LSPVAPLS*P-C(Sx)-RLQGP-Z (SEQ ID NO: 1108), X-LSRDLIMKEDYE-C(Sx)-VS*TKPTR-Z (SEQ ID NO: 4104), X-LSRDLIMKEDYE-C(Sx)-VS*TK-Z (SEQ ID NO: 4105), X-LVEKLPDS*P-C(Sx)-LAKKA-Z (SEQ ID NO: 1078), X-M-C(Sx)-LS*PGPF-Z (SEQ ID NO: 4106), X-NAKTTKKRPQRATS*N-C(Sx)-FS-Z (SEQ ID NO: 4107), X-NAKTTKKRPQRATSN-C(Sx)-FS*-Z (SEQ ID NO: 4108), X-NANPLMA-C(Sx)-GT*LTRRHQNGRF-Z (SEQ ID NO: 4109), X-N-C(Sx)-DS*LRRKAK-Z (SEQ ID NO: 4110), X-N-C(Sx)-LS*PGPF-Z (SEQ ID NO: 4111), X-NKEKKAVS*P-C(Sx)-LLTIT-Z (SEQ ID NO: 4112), X-NKEKK-C(Sx)-VS*PLLLTIT-Z (SEQ ID NO: 4113), X-NKRPQRAT*S-C(Sx)-VFAMF-Z (SEQ ID NO: 4114), X-NLLR-C(Sx)-SS*RRIRR-Z (SEQ ID NO: 4115), X-NLPWWR-C(Sx)-YT*WVVERDVNTKQR-Z (SEQ ID NO: 4116), X-NPQDSVGS*P-C(Sx)-SRVGE-Z (SEQ ID NO: 1084), X-NQREGFGRQS*M-C(Sx)-EKR-Z (SEQ ID NO: 4117), X-NQRKA-C(Sx)-RS*LAPRFDL-Z (SEQ ID NO: 4118), X-NQRKAKRS*L-C(Sx)-PRFDL-Z (SEQ ID NO: 4119), X-NR-C(Sx)-LS*FAEG-Z (SEQ ID NO: 4120), X-NR-C(Sx)-LS*FAEPG-Z (SEQ ID NO: 4121), X-NRR-C(Sx)-AS*FRRR-Z (SEQ ID NO: 4122), X-NSKYNAES*T-C(Sx)-RESQDT-Z (SEQ ID NO: 4123), X-NTIDL-C(Sx)-MS*PRTLDSL-Z (SEQ ID NO: 1029), X-NTIDLPMS*P-C(Sx)-TLDSL-Z (SEQ ID NO: 1028), and X-NVLAP-C(Sx)-PS*QAMDDLM-Z (SEQ ID NO: 4124); wherein X— is H or acetyl; and Z is OH or NH2.

[0166] In some embodiments, the metal-binding compound of the present invention is selected from the group consisting of: X-NVRVSNGS*P-C(Sx)-LER[Nle]D-Z (SEQ ID NO: 4125), X-PAADA-C(Sx)-[Nle]S*PEEELDG-Z (SEQ ID NO: 4126), X-PAADAI[Nle]S*P-C(Sx)-EELDG-Z (SEQ ID NO: 4127), X-PAKTTKKRPQRATS*N-C(Sx)-FS-Z (SEQ ID NO: 4128), X-PAKTTKKRPQRATSN-C(Sx)-FS*-Z (SEQ ID NO: 4129), X-PANPLMA-C(Sx)-GT*LTRRHQNGRF-Z (SEQ ID NO: 4130), X-P-C(Sx)-DS*LRRKAK-Z (SEQ ID NO: 4131), X-P-C(Sx)-ES*QEAFADLWKK-Z (SEQ ID NO: 4132), X-P-C(Sx)-LS*PGPF-Z (SEQ ID NO: 4133), X-PDTS*Y-C(Sx)-LTPHTEEKY-Z (SEQ ID NO: 4134), X-PDTSY-C(Sx)-LT*PHTEEKY-Z (SEQ ID NO: 1149), X-PDTSYVLT*P-C(Sx)-TEEKY-Z (SEQ ID NO: 1148), X-PDVE[Nle]PS*P-C(Sx)-APSGD-Z (SEQ ID NO: 4135), X-PKRPQRAT*S-C(Sx)-VFAMF-Z (SEQ ID NO: 4136), X-PLKTGEQT*P-C(Sx)-HEHI-Z (SEQ ID NO: 1116), X-PLLR-C(Sx)-SS*RRIRR-Z (SEQ ID NO: 4137), X-PLPWWR-C(Sx)-YT*WVVERDVNTKQR-Z (SEQ ID NO: 4138), X-PLQRQPSS*P-C(Sx)-PTPRN-Z (SEQ ID NO: 1167), X-PLQRQPSSP-C(Sx)-PT*PRN-Z (SEQ ID NO: 4139), X-PLST*W-C(Sx)-GSPPYAAPEAKKK-Z (SEQ ID NO: 4140), X-PLSTW-C(Sx)-GS*PPYAAPEAKKK-Z (SEQ ID NO: 4141), X-PNTED-C(Sx)-ES*PSVKR[Nle]RKKK-Z (SEQ ID NO: 4142), X-PNTEDRES*P-C(Sx)-VKR[Nle]R-Z (SEQ ID NO: 4143), X-PPYNRAVS*L-C(Sx)-SPVSV-Z (SEQ ID NO: 1169), X-PQREGFGRQS*M-C(Sx)-EKR-Z (SEQ ID NO: 4144), X-PR-C(Sx)-KS*LVGTPYW[Nle]APELISR-Z (SEQ ID NO: 4145), X-PR-C(Sx)-KS*LVGTPYW[Nle]APE-Z (SEQ ID NO: 4146), X-PR-C(Sx)-KS*LVGTPYWMAPE-Z (SEQ ID NO: 4147), X-PR-C(Sx)-KS*LVGTPYWM-Z (SEQ ID NO: 4148), X-PR-C(Sx)-KT*PEIFRAL-Z (SEQ ID NO: 4149), X-PRPKT*P-C(Sx)-IFRAL-Z (SEQ ID NO: 4150), X-PRR-C(Sx)-AS*FRRR-Z (SEQ ID NO: 4151), X-PRTSPI[Nle]S*P-C(Sx)-TSLAE-Z (SEQ ID NO: 4152), X-PRTSPI[Nle]SP-C(Sx)-TS*LAE-Z (SEQ ID NO: 4153), X-PS*Y-C(Sx)-RSRSRSRSRSRSRSRSN-Z (SEQ ID NO: 4154), X-PSRPP-C(Sx)-PT*PRRPASV-Z (SEQ ID NO: 4155), X-PSVEP-C(Sx)-LS*QETFSDL-Z (SEQ ID NO: 4156), X-PSWHLADS*P-C(Sx)-VNGAT-Z (SEQ ID NO: 1105), X-PSY-C(Sx)-RS*RSRSRSRSRSRSRSN-Z (SEQ ID NO: 4157), X-PSYGR-C(Sx)-RS*RSRSRSRSRSRSN-Z (SEQ ID NO: 4158), X-PSYGRS*R-C(Sx)-RSRSRSRSRSRSN-Z (SEQ ID NO: 4159), X-PSYGRSR-C(Sx)-RS*RSRSRSRSRSN-Z (SEQ ID NO: 4160), X-PSYGRSRSRS*R-C(Sx)-RSRSRSRSN-Z (SEQ ID NO: 4161), X-PSYGRSRSRSR-C(Sx)-RS*RSRSRSN-Z (SEQ ID NO: 4162), X-PSYGRSRSRSRS*R-C(Sx)-RSRSRSN-Z (SEQ ID NO: 4163), X-PSYGRSRSRSRSR-C(Sx)-RS*RSRSN-Z (SEQ ID NO: 4164), X-PSYGRSRSRSRSRS*R-C(Sx)-RSRSN-Z (SEQ ID NO: 4165), X-PSYGRSRSRSRSRSR-C(Sx)-RS*RSN-Z (SEQ ID NO: 4166), X-PSYGRSRSRSRSRSRS*R-C(Sx)-RSN-Z (SEQ ID NO: 4167), X-PSYGRSRSRSRSRSRSR-C(Sx)-RS*N-Z (SEQ ID NO: 4168), X-PSYGRSRSRSRSRSRSRS*R-C(Sx)-N-Z (SEQ ID NO: 4169), X-PSYGRSRSRSRSRSRSRSRS*N-C(Sx)-Z (SEQ ID NO: 4170), X-PTIPGVTS*P-C(Sx)-SDEPP-Z (SEQ ID NO: 1068), X-PTSPRRYS*P-C(Sx)-AKDLL-Z (SEQ ID NO: 1106), X-PVPEYI-C(Sx)-QS*V-Z (SEQ ID NO: 4171), X-PVVS*G-C(Sx)-TSPRHLSNV-Z (SEQ ID NO: 4172), X-PVVSG-C(Sx)-TS*PRHLSNV-Z (SEQ ID NO: 1067), X-PVVSGDTS*P-C(Sx)-HLSNV-Z (SEQ ID NO: 1066), X-Q[Nle]AGT-C(Sx)-IT*PLKDGFTKKK-Z (SEQ ID NO: 4173), X-QALDNPEYH-C(Sx)-AS*NGP-Z (SEQ ID NO: 4174), X-QANPLMA-C(Sx)-GT*LTRRHQNGRF-Z (SEQ ID NO: 4175), X-QARAK-C(Sx)-QT*PPVSPAP-Z (SEQ ID NO: 1074), X-QARAKTQT*P-C(Sx)-VSPAP-Z (SEQ ID NO: 1073), X-QARAKTQTP-C(Sx)-VS*PAP-Z (SEQ ID NO: 4176), X-Q-C(Sx)-DS*LRRKAK-Z (SEQ ID NO: 4177), X-Q-C(Sx)-LS*PGPF-Z (SEQ ID NO: 4178), X-QE-C(Sx)-FS*DLWKLLP-Z (SEQ ID NO: 1002), X-QETFS*D-C(Sx)-WKLLP-Z (SEQ ID NO: 1001), X-QGV-C(Sx)-ES*PFTRTGEGLDIR-Z (SEQ ID NO: 4179), X-QGVPES*P-C(Sx)-TRTGEGLDIR-Z (SEQ ID NO: 4180), X-QGVPES-C(Sx)-FT*RTGEGLDIR-Z (SEQ ID NO: 4181), X-QGVPESPF-C(Sx)-RT*GEGLDIR-Z (SEQ ID NO: 4182), X-QGVPESPFT*R-C(Sx)-GEGLDIR-Z (SEQ ID NO: 4183), X-QGVPESPFTRT*G-C(Sx)-GLDIR-Z (SEQ ID NO: 4184), X-QHSSPAVS*D-C(Sx)-LPSNS-Z (SEQ ID NO: 1178), X-QKRPQRAT*S-C(Sx)-VFAMF-Z (SEQ ID NO: 4185), X-QLLR-C(Sx)-SS*RRIRR-Z (SEQ ID NO: 4186), X-QLPWWR-C(Sx)-YT*WVVERDVNTKQR-Z (SEQ ID NO: 4187), X-QLS*K-C(Sx)-PGSPTSRSSD-Z (SEQ ID NO: 4188), X-QMFHLDPS*L-C(Sx)-HTIFN-Z (SEQ ID NO: 4189), X-QMFHLDPSL-C(Sx)-HT*IFN-Z (SEQ ID NO: 4190), X-QP-C(Sx)-AS*PVV-Z (SEQ ID NO: 4191), X-QQREGFGRQS*M-C(Sx)-EKR-Z (SEQ ID NO: 4192), and X-QRE-C(Sx)-VS*SLDSSSLSLKKK-Z (SEQ ID NO: 4193); wherein X— is H or acetyl; and Z is OH or NH2.

[0167] In some embodiments, the metal-binding compound of the present invention is selected from the group consisting of: X-QRR-C(Sx)-AS*FRRR-Z (SEQ ID NO: 4194), X-QS[Nle]VV-C(Sx)-QT*PLHTARV-Z (SEQ ID NO: 4195), X-QYHFVAS-C(Sx)-ST*IERDRQRPYS-Z (SEQ ID NO: 1198), X-QYHFVASSST*I-C(Sx)-RDRQRPYS-Z (SEQ ID NO: 1197), X-R[Nle]PWWR-C(Sx)-YT*WVVERDVNTKQR-Z (SEQ ID NO: 4196), X-R[Nle]R-C(Sx)-AS*FRRR-Z (SEQ ID NO: 4197), X-RADPQ-C(Sx)-PS*RTPVQGP-Z (SEQ ID NO: 1190), X-RAKTTKKRPQRATS*N-C(Sx)-FS-Z (SEQ ID NO: 4198), X-RAKITKKRPQRATSN-C(Sx)-FS*-Z (SEQ ID NO: 4199), X-RANPLMA-C(Sx)-GT*LTRRHQNGRF-Z (SEQ ID NO: 4200), X-RAPWWR-C(Sx)-YT*WVVERDVNTKQR-Z (SEQ ID NO: 4201), X-RAR-C(Sx)-AS*FRRR-Z (SEQ ID NO: 4202), X-RAR-C(Sx)-LS*FAEG-Z (SEQ ID NO: 4203), X-RAR-C(Sx)-LS*FAEPG-Z (SEQ ID NO: 4204), X-RARR-C(Sx)-LS*FSGFGSR-Z (SEQ ID NO: 4205), X-R-C(Sx)-AS*FRRR-Z (SEQ ID NO: 4206), X-R-C(Sx)-AS*FRR-Z (SEQ ID NO: 4207), X-R-C(Sx)-AS*FR-Z (SEQ ID NO: 4208), X-R-C(Sx)-DS*LRRKAK-Z (SEQ ID NO: 4209), X-R-C(Sx)-FS*LRRKAK-Z (SEQ ID NO: 1191), X-R-C(Sx)-LS*FAEG-Z (SEQ ID NO: 4210), X-R-C(Sx)-LS*FAEPG-Z (SEQ ID NO: 4211), X-R-C(Sx)-LS*PGPF-Z (SEQ ID NO: 4212), X-RDPWWR-C(Sx)-YT*WVVERDVNTKQR-Z (SEQ ID NO: 4213), X-RDR-C(Sx)-AS*FRRR-Z (SEQ ID NO: 4214), X-RE-C(Sx)-LS*RRP[pS]YR-Z (SEQ ID NO: 4215), X-REPWWR-C(Sx)-YT*WVVERDVNTKQR-Z (SEQ ID NO: 4216), X-RER-C(Sx)-AS*FRRR-Z (SEQ ID NO: 4217), X-RFDS*R-C(Sx)-ISGLLTTAKKK-Z (SEQ ID NO: 4218), X-RFDSR-C(Sx)-IS*GLLTTAKKK-Z (SEQ ID NO: 4219), X-RFI-C(Sx)-PT*ALIRF-Z (SEQ ID NO: 4220), X-RFI-C(Sx)-PT*NRRRF-Z (SEQ ID NO: 4221), X-RFILPT*A-C(Sx)-IRF-Z (SEQ ID NO: 4222), X-RFILPT*N-C(Sx)-RRF-Z (SEQ ID NO: 4223), X-RFPWWR-C(Sx)-YT*WVVERDVNTKQR-Z (SEQ ID NO: 4224), X-RFR-C(Sx)-AS*FRRR-Z (SEQ ID NO: 4225), X-RGGPEPLS*P-C(Sx)-PVSPL-Z (SEQ ID NO: 1088), X-RGPWWR-C(Sx)-YT*WVVERDVNTKQR-Z (SEQ ID NO: 4226), X-RGR-C(Sx)-AS*FRRR-Z (SEQ ID NO: 4227), X-RGS[Nle]AAPS*L-C(Sx)-PSLGP-Z (SEQ ID NO: 4228), X-RGS[Nle]AAPSL-C(Sx)-PS*LGP-Z (SEQ ID NO: 4229), X-RHD[pS]GLDS*M-C(Sx)-DEEYE-Z (SEQ ID NO: 4230), X-RHPWWR-C(Sx)-YT*WVVERDVNTKQR-Z (SEQ ID NO: 4231), X-RHR-C(Sx)-AS*FRRR-Z (SEQ ID NO: 4232), X-RIPWWR-C(Sx)-YT*WVVERDVNTKQR-Z (SEQ ID NO: 4233), X-RIR-C(Sx)-AS*FRRR-Z (SEQ ID NO: 4234), X-RKKYKFN-C(Sx)-DT*ERRRFL-Z (SEQ ID NO: 4235), X-RKPWWR-C(Sx)-YT*WVVERDVNTKQR-Z (SEQ ID NO: 4236), X-RKR-C(Sx)-AS*FRRR-Z (SEQ ID NO: 4237), X-RKRKGS*F-C(Sx)-YGG-Z (SEQ ID NO: 4238), X-RKRPQRAT*S-C(Sx)-VFAMF-Z (SEQ ID NO: 4239), and X-RLGWWR-C(Sx)-FT*LRRARQGNTKQR-Z (SEQ ID NO: 4240); wherein X— is H or acetyl; and Z is OH or NH2.

[0168] In some embodiments, the metal-binding compound of the present invention is selected from the group consisting of: X-RLGWWR-C(Sx)-YT*LQRARDGNTKQR-Z (SEQ ID NO: 4241), X-RLGWWR-C(Sx)-YT*LQRARDVNTKQR-Z (SEQ ID NO: 4242), X-RLGWWR-C(Sx)-YT*LQRAREGNTKQR-Z (SEQ ID NO: 4243), X-RLGWWR-C(Sx)-YT*LQRAREVNTKQR-Z (SEQ ID NO: 4244), X-RLGWWR-C(Sx)-YT*LQRARQGNTKQR-Z (SEQ ID NO: 4245), X-RLGWWR-C(Sx)-YT*LQRARQVNTKQR-Z (SEQ ID NO: 4246), X-RLGWWR-C(Sx)-YT*LQRERDGNTKQR-Z (SEQ ID NO: 4247), X-RLGWWR-C(Sx)-YT*LQRERDVNTKQR-Z (SEQ ID NO: 4248), X-RLGWWR-C(Sx)-YT*LQREREGNTKQR-Z (SEQ ID NO: 4249), X-RLGWWR-C(Sx)-YT*LQREREVNTKQR-Z (SEQ ID NO: 4250), X-RLGWWR-C(Sx)-YT*LQRERQGNTKQR-Z (SEQ ID NO: 4251), X-RLGWWR-C(Sx)-YT*LQRERQVNTKQR-Z (SEQ ID NO: 4252), X-RLGWWR-C(Sx)-YT*LQVARDGNTKQR-Z (SEQ ID NO: 4253), X-RLGWWR-C(Sx)-YT*LQVARDVNTKQR-Z (SEQ ID NO: 4254), X-RLGWWR-C(Sx)-YT*LQVAREGNTKQR-Z (SEQ ID NO: 4255), X-RLGWWR-C(Sx)-YT*LQVAREVNTKQR-Z (SEQ ID NO: 4256), X-RLGWWR-C(Sx)-YT*LQVARQGNTKQR-Z (SEQ ID NO: 4257), X-RLGWWR-C(Sx)-YT*LQVARQVNTKQR-Z (SEQ ID NO: 4258), X-RLGWWR-C(Sx)-YT*LQVERDGNTKQR-Z (SEQ ID NO: 4259), X-RLGWWR-C(Sx)-YT*LQVERDVNTKQR-Z (SEQ ID NO: 4260), X-RLGWWR-C(Sx)-YT*LQVEREGNTKQR-Z (SEQ ID NO: 4261), X-RLGWWR-C(Sx)-YT*LQVEREVNTKQR-Z (SEQ ID NO: 4262), X-RLGWWR-C(Sx)-YT*LQVERQGNTKQR-Z (SEQ ID NO: 4263), X-RLGWWR-C(Sx)-YT*LQVERQVNTKQR-Z (SEQ ID NO: 4264), X-RLGWWR-C(Sx)-YT*LRRARDGNTKQR-Z (SEQ ID NO: 4265), X-RLGWWR-C(Sx)-YT*LRRARDVNTKQR-Z (SEQ ID NO: 4266), X-RLGWWR-C(Sx)-YT*LRRAREGNTKQR-Z (SEQ ID NO: 4267), X-RLGWWR-C(Sx)-YT*LRRAREVNTKQR-Z (SEQ ID NO: 4268), X-RLGWWR-C(Sx)-YT*LRRARQGNTKQR-Z (SEQ ID NO: 4269), X-RLGWWR-C(Sx)-YT*LRRARQVNTKQR-Z (SEQ ID NO: 4270), X-RLGWWR-C(Sx)-YT*LRRERDGNTKQR-Z (SEQ ID NO: 4271), X-RLGWWR-C(Sx)-YT*LRRERDVNTKQR-Z (SEQ ID NO: 4272), X-RLGWWR-C(Sx)-YT*LRREREGNTKQR-Z (SEQ ID NO: 4273), X-RLGWWR-C(Sx)-YT*LRREREVNTKQR-Z (SEQ ID NO: 4274), X-RLGWWR-C(Sx)-YT*LRRERQGNTKQR-Z (SEQ ID NO: 4275), X-RLGWWR-C(Sx)-YT*LRRERQVNTKQR-Z (SEQ ID NO: 4276), X-RLGWWR-C(Sx)-YT*LRVARDGNTKQR-Z (SEQ ID NO: 4277), X-RLGWWR-C(Sx)-YT*LRVARDVNTKQR-Z (SEQ ID NO: 4278), X-RLGWWR-C(Sx)-YT*LRVAREGNTKQR-Z (SEQ ID NO: 4279), X-RLGWWR-C(Sx)-YT*LRVAREVNTKQR-Z (SEQ ID NO: 4280), X-RLGWWR-C(Sx)-YT*LRVARQGNTKQR-Z (SEQ ID NO: 4281), X-RLGWWR-C(Sx)-YT*LRVARQVNTKQR-Z (SEQ ID NO: 4282), X-RLGWWR-C(Sx)-YT*LRVERDGNTKQR-Z (SEQ ID NO: 4283), X-RLGWWR-C(Sx)-YT*LRVERDVNTKQR-Z (SEQ ID NO: 4284), X-RLGWWR-C(Sx)-YT*LRVEREGNTKQR-Z (SEQ ID NO: 4285), X-RLGWWR-C(Sx)-YT*LRVEREVNTKQR-Z (SEQ ID NO: 4286), X-RLGWWR-C(Sx)-YT*LRVERQGNTKQR-Z (SEQ ID NO: 4287), X-RLGWWR-C(Sx)-YT*LRVERQVNTKQR-Z (SEQ ID NO: 4288), X-RLGWWR-C(Sx)-YT*LVRARDGNTKQR-Z (SEQ ID NO: 4289), X-RLGWWR-C(Sx)-YT*LVRARDVNTKQR-Z (SEQ ID NO: 4290), and X-RLGWWR-C(Sx)-YT*LVRAREGNTKQR-Z (SEQ ID NO: 4291); wherein X— is H or acetyl; and Z is OH or NH2.

[0169] In some embodiments, the metal-binding compound of the present invention is selected from the group consisting of: X-RLGWWR-C(Sx)-YT*LVRAREVNTKQR-Z (SEQ ID NO: 4292), X-RLGWWR-C(Sx)-YT*LVRARQGNTKQR-Z (SEQ ID NO: 4293), X-RLGWWR-C(Sx)-YT*LVRARQVNTKQR-Z (SEQ ID NO: 4294), X-RLGWWR-C(Sx)-YT*LVRERDGNTKQR-Z (SEQ ID NO: 4295), X-RLGWWR-C(Sx)-YT*LVRERDVNTKQR-Z (SEQ ID NO: 4296), X-RLGWWR-C(Sx)-YT*LVREREGNTKQR-Z (SEQ ID NO: 4297), X-RLGWWR-C(Sx)-YT*LVREREVNTKQR-Z (SEQ ID NO: 4298), X-RLGWWR-C(Sx)-YT*LVRERQGNTKQR-Z (SEQ ID NO: 4299), X-RLGWWR-C(Sx)-YT*LVRERQVNTKQR-Z (SEQ ID NO: 4300), X-RLGWWR-C(Sx)-YT*LVVARDGNTKQR-Z (SEQ ID NO: 4301), X-RLGWWR-C(Sx)-YT*LVVARDVNTKQR-Z (SEQ ID NO: 4302), X-RLGWWR-C(Sx)-YT*LVVAREGNTKQR-Z (SEQ ID NO: 4303), X-RLGWWR-C(Sx)-YT*LVVAREVNTKQR-Z (SEQ ID NO: 4304), X-RLGWWR-C(Sx)-YT*LVVARQGNTKQR-Z (SEQ ID NO: 4305), X-RLGWWR-C(Sx)-YT*LVVARQVNTKQR-Z (SEQ ID NO: 4306), X-RLGWWR-C(Sx)-YT*LVVERDGNTKQR-Z (SEQ ID NO: 4307), X-RLGWWR-C(Sx)-YT*LVVERDVNTKQR-Z (SEQ ID NO: 4308), X-RLGWWR-C(Sx)-YT*LVVEREGNTKQR-Z (SEQ ID NO: 4309), X-RLGWWR-C(Sx)-YT*LVVEREVNTKQR-Z (SEQ ID NO: 4310), X-RLGWWR-C(Sx)-YT*LVVERQGNTKQR-Z (SEQ ID NO: 4311), X-RLGWWR-C(Sx)-YT*LVVERQVNTKQR-Z (SEQ ID NO: 4312), X-RLGWWR-C(Sx)-YT*WQRARDGNTKQR-Z (SEQ ID NO: 4313), X-RLGWWR-C(Sx)-YT*WQRARDVNTKQR-Z (SEQ ID NO: 4314), X-RLGWWR-C(Sx)-YT*WQRAREGNTKQR-Z (SEQ ID NO: 4315), X-RLGWWR-C(Sx)-YT*WQRAREVNTKQR-Z (SEQ ID NO: 4316), X-RLGWWR-C(Sx)-YT*WQRARQGNTKQR-Z (SEQ ID NO: 4317), X-RLGWWR-C(Sx)-YT*WQRARQVNTKQR-Z (SEQ ID NO: 4318), X-RLGWWR-C(Sx)-YT*WQRERDGNTKQR-Z (SEQ ID NO: 4319), X-RLGWWR-C(Sx)-YT*WQRERDVNTKQR-Z (SEQ ID NO: 4320), X-RLGWWR-C(Sx)-YT*WQREREGNTKQR-Z (SEQ ID NO: 4321), X-RLGWWR-C(Sx)-YT*WQREREVNTKQR-Z (SEQ ID NO: 4322), X-RLGWWR-C(Sx)-YT*WQRERQGNTKQR-Z (SEQ ID NO: 4323), X-RLGWWR-C(Sx)-YT*WQRERQVNTKQR-Z (SEQ ID NO: 4324), X-RLGWWR-C(Sx)-YT*WQVARDGNTKQR-Z (SEQ ID NO: 4325), X-RLGWWR-C(Sx)-YT*WQVARDVNTKQR-Z (SEQ ID NO: 4326), X-RLGWWR-C(Sx)-YT*WQVAREGNTKQR-Z (SEQ ID NO: 4327), X-RLGWWR-C(Sx)-YT*WQVAREVNTKQR-Z (SEQ ID NO: 4328), X-RLGWWR-C(Sx)-YT*WQVARQGNTKQR-Z (SEQ ID NO: 4329), X-RLGWWR-C(Sx)-YT*WQVARQVNTKQR-Z (SEQ ID NO: 4330), X-RLGWWR-C(Sx)-YT*WQVERDGNTKQR-Z (SEQ ID NO: 4331), X-RLGWWR-C(Sx)-YT*WQVERDVNTKQR-Z (SEQ ID NO: 4332), X-RLGWWR-C(Sx)-YT*WQVEREGNTKQR-Z (SEQ ID NO: 4333), X-RLGWWR-C(Sx)-YT*WQVEREVNTKQR-Z (SEQ ID NO: 4334), X-RLGWWR-C(Sx)-YT*WQVERQGNTKQR-Z (SEQ ID NO: 4335), X-RLGWWR-C(Sx)-YT*WQVERQVNTKQR-Z (SEQ ID NO: 4336), X-RLGWWR-C(Sx)-YT*WRRARDGNTKQR-Z (SEQ ID NO: 4337), X-RLGWWR-C(Sx)-YT*WRRARDVNTKQR-Z (SEQ ID NO: 4338), X-RLGWWR-C(Sx)-YT*WRRAREGNTKQR-Z (SEQ ID NO: 4339), X-RLGWWR-C(Sx)-YT*WRRAREVNTKQR-Z (SEQ ID NO: 4340), X-RLGWWR-C(Sx)-YT*WRRARQGNTKQR-Z (SEQ ID NO: 4341), X-RLGWWR-C(Sx)-YT*WRRARQVNTKQR-Z (SEQ ID NO: 4342), X-RLGWWR-C(Sx)-YT*WRRERDGNTKQR-Z (SEQ ID NO: 4343), X-RLGWWR-C(Sx)-YT*WRRERDVNTKQR-Z (SEQ ID NO: 4344), X-RLGWWR-C(Sx)-YT*WRREREGNTKQR-Z (SEQ ID NO: 4345), X-RLGWWR-C(Sx)-YT*WRREREVNTKQR-Z (SEQ ID NO: 4346), X-RLGWWR-C(Sx)-YT*WRRERQGNTKQR-Z (SEQ ID NO: 4347), X-RLGWWR-C(Sx)-YT*WRRERQVNTKQR-Z (SEQ ID NO: 4348), X-RLGWWR-C(Sx)-YT*WRVARDGNTKQR-Z (SEQ ID NO: 4349), X-RLGWWR-C(Sx)-YT*WRVARDVNTKQR-Z (SEQ ID NO: 4350), X-RLGWWR-C(Sx)-YT*WRVAREGNTKQR-Z (SEQ ID NO: 4351), X-RLGWWR-C(Sx)-YT*WRVAREVNTKQR-Z (SEQ ID NO: 4352), X-RLGWWR-C(Sx)-YT*WRVARQGNTKQR-Z (SEQ ID NO: 4353), X-RLGWWR-C(Sx)-YT*WRVARQVNTKQR-Z (SEQ ID NO: 4354), X-RLGWWR-C(Sx)-YT*WRVERDGNTKQR-Z (SEQ ID NO: 4355), X-RLGWWR-C(Sx)-YT*WRVERDVNTKQR-Z (SEQ ID NO: 4356), X-RLGWWR-C(Sx)-YT*WRVEREGNTKQR-Z (SEQ ID NO: 4357), X-RLGWWR-C(Sx)-YT*WRVEREVNTKQR-Z (SEQ ID NO: 4358), X-RLGWWR-C(Sx)-YT*WRVERQGNTKQR-Z (SEQ ID NO: 4359), and X-RLGWWR-C(Sx)-YT*WRVERQVNTKQR-Z (SEQ ID NO: 4360); wherein X— is H or acetyl; and Z is OH or NH2.

[0170] In some embodiments, the metal-binding compound of the present invention is selected from the group consisting of: X-RLGWWR-C(Sx)-YT*WVRARDGNTKQR-Z (SEQ ID NO: 4361), X-RLGWWR-C(Sx)-YT*WVRARDVNTKQR-Z (SEQ ID NO: 4362), X-RLGWWR-C(Sx)-YT*WVRAREGNTKQR-Z (SEQ ID NO: 4363), X-RLGWWR-C(Sx)-YT*WVRAREVNTKQR-Z (SEQ ID NO: 4364), X-RLGWWR-C(Sx)-YT*WVRARQGNTKQR-Z (SEQ ID NO: 4365), X-RLGWWR-C(Sx)-YT*WVRARQVNTKQR-Z (SEQ ID NO: 4366), X-RLGWWR-C(Sx)-YT*WVRERDGNTKQR-Z (SEQ ID NO: 4367), X-RLGWWR-C(Sx)-YT*WVRERDVNTKQR-Z (SEQ ID NO: 4368), X-RLGWWR-C(Sx)-YT*WVREREGNTKQR-Z (SEQ ID NO: 4369), X-RLGWWR-C(Sx)-YT*WVREREVNTKQR-Z (SEQ ID NO: 4370), X-RLGWWR-C(Sx)-YT*WVRERQGNTKQR-Z (SEQ ID NO: 4371), X-RLGWWR-C(Sx)-YT*WVRERQVNTKQR-Z (SEQ ID NO: 4372), X-RLGWWR-C(Sx)-YT*WVVARDGNTKQR-Z (SEQ ID NO: 4373), X-RLGWWR-C(Sx)-YT*WVVARDVNTKQR-Z (SEQ ID NO: 4374), X-RLGWWR-C(Sx)-YT*WVVAREGNTKQR-Z (SEQ ID NO: 4375), X-RLGWWR-C(Sx)-YT*WVVAREVNTKQR-Z (SEQ ID NO: 4376), X-RLGWWR-C(Sx)-YT*WVVARQGNTKQR-Z (SEQ ID NO: 4377), X-RLGWWR-C(Sx)-YT*WVVARQVNTKQR-Z (SEQ ID NO: 4378), X-RLGWWR-C(Sx)-YT*WVVERDGNTKQR-Z (SEQ ID NO: 4379), X-RLGWWR-C(Sx)-YT*WVVERDVNTKQR-Z (SEQ ID NO: 4380), X-RLGWWR-C(Sx)-YT*WVVEREGNTKQR-Z (SEQ ID NO: 4381), X-RLGWWR-C(Sx)-YT*WVVEREVNTKQR-Z (SEQ ID NO: 4382), X-RLGWWR-C(Sx)-YT*WVVERQGNTKQR-Z (SEQ ID NO: 4383), X-RLGWWR-C(Sx)-YT*WVVERQVNTKQR-Z (SEQ ID NO: 4384), X-RLLR-C(Sx)-SS*RRIRR-Z (SEQ ID NO: 4385), X-RLPWWR-C(Sx)-FT*WVRERDVNTKQR-Z (SEQ ID NO: 4386), X-RLPWWR-C(Sx)-FT*WVVERDVNTKQR-Z (SEQ ID NO: 4387), X-RLPWWR-C(Sx)-YT*LQRARDGNTKQR-Z (SEQ ID NO: 4388), X-RLPWWR-C(Sx)-YT*LQRARDVNTKQR-Z (SEQ ID NO: 4389), X-RLPWWR-C(Sx)-YT*LQRAREGNTKQR-Z (SEQ ID NO: 4390), and X-RLPWWR-C(Sx)-YT*LQRAREVNTKQR-Z (SEQ ID NO: 4391); wherein X is H or acetyl; and Z is OH or NH2.

[0171] In some embodiments, the metal-binding compound of the present invention is selected from the group consisting of: X-RLPWWR-C(Sx)-YT*LQRARQGNTKQR-Z (SEQ ID NO: 4392), X-RLPWWR-C(Sx)-YT*LQRARQVNTKQR-Z (SEQ ID NO: 4393), X-RLPWWR-C(Sx)-YT*LQRERDGNTKQR-Z (SEQ ID NO: 4394), X-RLPWWR-C(Sx)-YT*LQRERDVNTKQR-Z (SEQ ID NO: 4395), X-RLPWWR-C(Sx)-YT*LQREREGNTKQR-Z (SEQ ID NO: 4396), X-RLPWWR-C(Sx)-YT*LQREREVNTKQR-Z (SEQ ID NO: 4397), X-RLPWWR-C(Sx)-YT*LQRERQGNTKQR-Z (SEQ ID NO: 4398), X-RLPWWR-C(Sx)-YT*LQRERQVNTKQR-Z (SEQ ID NO: 4399), X-RLPWWR-C(Sx)-YT*LQVARDGNTKQR-Z (SEQ ID NO: 4400), X-RLPWWR-C(Sx)-YT*LQVARDVNTKQR-Z (SEQ ID NO: 4401), X-RLPWWR-C(Sx)-YT*LQVAREGNTKQR-Z (SEQ ID NO: 4402), X-RLPWWR-C(Sx)-YT*LQVAREVNTKQR-Z (SEQ ID NO: 4403), X-RLPWWR-C(Sx)-YT*LQVARQGNTKQR-Z (SEQ ID NO: 4404), X-RLPWWR-C(Sx)-YT*LQVARQVNTKQR-Z (SEQ ID NO: 4405), X-RLPWWR-C(Sx)-YT*LQVERDGNTKQR-Z (SEQ ID NO: 4406), X-RLPWWR-C(Sx)-YT*LQVERDVNTKQR-Z (SEQ ID NO: 4407), X-RLPWWR-C(Sx)-YT*LQVEREGNTKQR-Z (SEQ ID NO: 4408), X-RLPWWR-C(Sx)-YT*LQVEREVNTKQR-Z (SEQ ID NO: 4409), X-RLPWWR-C(Sx)-YT*LQVERQGNTKQR-Z (SEQ ID NO: 4410), X-RLPWWR-C(Sx)-YT*LQVERQVNTKQR-Z (SEQ ID NO: 4411), X-RLPWWR-C(Sx)-YT*LRRARDGNTKQR-Z (SEQ ID NO: 4412), X-RLPWWR-C(Sx)-YT*LRRARDVNTKQR-Z (SEQ ID NO: 4413), X-RLPWWR-C(Sx)-YT*LRRAREGNTKQR-Z (SEQ ID NO: 4414), X-RLPWWR-C(Sx)-YT*LRRAREVNTKQR-Z (SEQ ID NO: 4415), X-RLPWWR-C(Sx)-YT*LRRARQGNTKQR-Z (SEQ ID NO: 4416), X-RLPWWR-C(Sx)-YT*LRRARQVNTKQR-Z (SEQ ID NO: 4417), X-RLPWWR-C(Sx)-YT*LRRERDGNTKQR-Z (SEQ ID NO: 4418), X-RLPWWR-C(Sx)-YT*LRRERDVNTKQR-Z (SEQ ID NO: 4419), X-RLPWWR-C(Sx)-YT*LRREREGNTKQR-Z (SEQ ID NO: 4420), X-RLPWWR-C(Sx)-YT*LRREREVNTKQR-Z (SEQ ID NO: 4421), X-RLPWWR-C(Sx)-YT*LRRERQGNTKQR-Z (SEQ ID NO: 4422), X-RLPWWR-C(Sx)-YT*LRRERQVNTKQR-Z (SEQ ID NO: 4423), X-RLPWWR-C(Sx)-YT*LRVARDGNTKQR-Z (SEQ ID NO: 4424), X-RLPWWR-C(Sx)-YT*LRVARDVNTKQR-Z (SEQ ID NO: 4425), and X-RLPWWR-C(Sx)-YT*LRVAREGNTKQR-Z (SEQ ID NO: 4426); wherein X— is H or acetyl; and Z is OH or NH2.

[0172] In some embodiments, the metal-binding compound of the present invention is selected from the group consisting of: X-RLPWWR-C(Sx)-YT*LRVAREVNTKQR-Z (SEQ ID NO: 4427), X-RLPWWR-C(Sx)-YT*LRVARQGNTKQR-Z (SEQ ID NO: 4428), X-RLPWWR-C(Sx)-YT*LRVARQVNTKQR-Z (SEQ ID NO: 4429), X-RLPWWR-C(Sx)-YT*LRVERDGNTKQR-Z (SEQ ID NO: 4430), X-RLPWWR-C(Sx)-YT*LRVERDVNTKQR-Z (SEQ ID NO: 4431), X-RLPWWR-C(Sx)-YT*LRVEREGNTKQR-Z (SEQ ID NO: 4432), X-RLPWWR-C(Sx)-YT*LRVEREVNTKQR-Z (SEQ ID NO: 4433), X-RLPWWR-C(Sx)-YT*LRVERQGNTKQR-Z (SEQ ID NO: 4434), X-RLPWWR-C(Sx)-YT*LRVERQVNTKQR-Z (SEQ ID NO: 4435), X-RLPWWR-C(Sx)-YT*LVRARDGNTKQR-Z (SEQ ID NO: 4436), X-RLPWWR-C(Sx)-YT*LVRARDVNTKQR-Z (SEQ ID NO: 4437), X-RLPWWR-C(Sx)-YT*LVRAREGNTKQR-Z (SEQ ID NO: 4438), X-RLPWWR-C(Sx)-YT*LVRAREVNTKQR-Z (SEQ ID NO: 4439), X-RLPWWR-C(Sx)-YT*LVRARQGNTKQR-Z (SEQ ID NO: 4440), X-RLPWWR-C(Sx)-YT*LVRARQVNTKQR-Z (SEQ ID NO: 4441), X-RLPWWR-C(Sx)-YT*LVRERDGNTKQR-Z (SEQ ID NO: 4442), X-RLPWWR-C(Sx)-YT*LVRERDVNTKQR-Z (SEQ ID NO: 4443), X-RLPWWR-C(Sx)-YT*LVREREGNTKQR-Z (SEQ ID NO: 4444), X-RLPWWR-C(Sx)-YT*LVREREVNTKQR-Z (SEQ ID NO: 4445), X-RLPWWR-C(Sx)-YT*LVRERQGNTKQR-Z (SEQ ID NO: 4446), X-RLPWWR-C(Sx)-YT*LVRERQVNTKQR-Z (SEQ ID NO: 4447), X-RLPWWR-C(Sx)-YT*LVVARDGNTKQR-Z (SEQ ID NO: 4448), X-RLPWWR-C(Sx)-YT*LVVARDVNTKQR-Z (SEQ ID NO: 4449), X-RLPWWR-C(Sx)-YT*LVVAREGNTKQR-Z (SEQ ID NO: 4450), X-RLPWWR-C(Sx)-YT*LVVAREVNTKQR-Z (SEQ ID NO: 4451), X-RLPWWR-C(Sx)-YT*LVVARQGNTKQR-Z (SEQ ID NO: 4452), X-RLPWWR-C(Sx)-YT*LVVARQVNTKQR-Z (SEQ ID NO: 4453), X-RLPWWR-C(Sx)-YT*LVVERDGNTKQR-Z (SEQ ID NO: 4454), X-RLPWWR-C(Sx)-YT*LVVERDVNTKQR-Z (SEQ ID NO: 4455), X-RLPWWR-C(Sx)-YT*LVVEREGNTKQR-Z (SEQ ID NO: 4456), X-RLPWWR-C(Sx)-YT*LVVEREVNTKQR-Z (SEQ ID NO: 4457), X-RLPWWR-C(Sx)-YT*LVVERQGNTKQR-Z (SEQ ID NO: 4458), X-RLPWWR-C(Sx)-YT*LVVERQVNTKQR-Z (SEQ ID NO: 4459), X-RLPWWR-C(Sx)-YT*WQRARDGNTKQR-Z (SEQ ID NO: 4460), X-RLPWWR-C(Sx)-YT*WQRARDVNTKQR-Z (SEQ ID NO: 4461), X-RLPWWR-C(Sx)-YT*WQRAREGNTKQR-Z (SEQ ID NO: 4462), X-RLPWWR-C(Sx)-YT*WQRAREVNTKQR-Z (SEQ ID NO: 4463), X-RLPWWR-C(Sx)-YT*WQRARQGNTKQR-Z (SEQ ID NO: 4464), X-RLPWWR-C(Sx)-YT*WQRARQVNTKQR-Z (SEQ ID NO: 4465), X-RLPWWR-C(Sx)-YT*WQRERDGNTKQR-Z (SEQ ID NO: 4466), X-RLPWWR-C(Sx)-YT*WQRERDVNTKQR-Z (SEQ ID NO: 4467), X-RLPWWR-C(Sx)-YT*WQREREGNTKQR-Z (SEQ ID NO: 4468), X-RLPWWR-C(Sx)-YT*WQREREVNTKQR-Z (SEQ ID NO: 4469), X-RLPWWR-C(Sx)-YT*WQRERQGNTKQR-Z (SEQ ID NO: 4470), X-RLPWWR-C(Sx)-YT*WQRERQVNTKQR-Z (SEQ ID NO: 4471), X-RLPWWR-C(Sx)-YT*WQVARDGNTKQR-Z (SEQ ID NO: 4472), X-RLPWWR-C(Sx)-YT*WQVARDVNTKQR-Z (SEQ ID NO: 4473), X-RLPWWR-C(Sx)-YT*WQVAREGNTKQR-Z (SEQ ID NO: 4474), X-RLPWWR-C(Sx)-YT*WQVAREVNTKQR-Z (SEQ ID NO: 4475), X-RLPWWR-C(Sx)-YT*WQVARQGNTKQR-Z (SEQ ID NO: 4476), X-RLPWWR-C(Sx)-YT*WQVARQVNTKQR-Z (SEQ ID NO: 4477), X-RLPWWR-C(Sx)-YT*WQVERDGNTKQR-Z (SEQ ID NO: 4478), X-RLPWWR-C(Sx)-YT*WQVERDVNTKQR-Z (SEQ ID NO: 4479), X-RLPWWR-C(Sx)-YT*WQVEREGNTKQR-Z (SEQ ID NO: 4480), and X-RLPWWR-C(Sx)-YT*WQVEREVNTKQR-Z (SEQ ID NO: 4481); wherein X is H or acetyl; and Z is OH or NH2.

[0173] In some embodiments, the metal-binding compound of the present invention is selected from the group consisting of: X-RLPWWR-C(Sx)-YT*WQVERQGNTKQR-Z (SEQ ID NO: 4482), X-RLPWWR-C(Sx)-YT*WQVERQVNTKQR-Z (SEQ ID NO: 4483), X-RLPWWR-C(Sx)-YT*WRRARDGNTKQR-Z (SEQ ID NO: 4484), X-RLPWWR-C(Sx)-YT*WRRARDVNTKQR-Z (SEQ ID NO: 4485), X-RLPWWR-C(Sx)-YT*WRRAREGNTKQR-Z (SEQ ID NO: 4486), X-RLPWWR-C(Sx)-YT*WRRAREVNTKQR-Z (SEQ ID NO: 4487), X-RLPWWR-C(Sx)-YT*WRRARQGNTKQR-Z (SEQ ID NO: 4488), X-RLPWWR-C(Sx)-YT*WRRARQVNTKQR-Z (SEQ ID NO: 4489), X-RLPWWR-C(Sx)-YT*WRRERDGNTKQR-Z (SEQ ID NO: 4490), X-RLPWWR-C(Sx)-YT*WRRERDVNTKQR-Z (SEQ ID NO: 4491), X-RLPWWR-C(Sx)-YT*WRREREGNTKQR-Z (SEQ ID NO: 4492), X-RLPWWR-C(Sx)-YT*WRREREVNTKQR-Z (SEQ ID NO: 4493), X-RLPWWR-C(Sx)-YT*WRRERQGNTKQR-Z (SEQ ID NO: 4494), X-RLPWWR-C(Sx)-YT*WRRERQVNTKQR-Z (SEQ ID NO: 4495), X-RLPWWR-C(Sx)-YT*WRVARDGNTKQR-Z (SEQ ID NO: 4496), X-RLPWWR-C(Sx)-YT*WRVARDVNTKQR-Z (SEQ ID NO: 4497), X-RLPWWR-C(Sx)-YT*WRVAREGNTKQR-Z (SEQ ID NO: 4498), X-RLPWWR-C(Sx)-YT*WRVAREVNTKQR-Z (SEQ ID NO: 4499), X-RLPWWR-C(Sx)-YT*WRVARQGNTKQR-Z (SEQ ID NO: 4500), X-RLPWWR-C(Sx)-YT*WRVARQVNTKQR-Z (SEQ ID NO: 4501), X-RLPWWR-C(Sx)-YT*WRVERDGNTKQR-Z (SEQ ID NO: 4502), X-RLPWWR-C(Sx)-YT*WRVERDVNTKQR-Z (SEQ ID NO: 4503), X-RLPWWR-C(Sx)-YT*WRVEREGNTKQR-Z (SEQ ID NO: 4504), X-RLPWWR-C(Sx)-YT*WRVEREVNTKQR-Z (SEQ ID NO: 4505), X-RLPWWR-C(Sx)-YT*WRVERQGNTKQR-Z (SEQ ID NO: 4506), X-RLPWWR-C(Sx)-YT*WRVERQVNTKQR-Z (SEQ ID NO: 4507), X-RLPWWR-C(Sx)-YT*WVRARDGNTKQR-Z (SEQ ID NO: 4508), X-RLPWWR-C(Sx)-YT*WVRARDVNTKQR-Z (SEQ ID NO: 4509), X-RLPWWR-C(Sx)-YT*WVRAREGNTKQR-Z (SEQ ID NO: 4510), X-RLPWWR-C(Sx)-YT*WVRAREVNTKQR-Z (SEQ ID NO: 4511), X-RLPWWR-C(Sx)-YT*WVRARQGNTKQR-Z (SEQ ID NO: 4512), X-RLPWWR-C(Sx)-YT*WVRARQVNTKQR-Z (SEQ ID NO: 4513), X-RLPWWR-C(Sx)-YT*WVRERDGNTKQR-Z (SEQ ID NO: 4514), X-RLPWWR-C(Sx)-YT*WVRERDVNTKQR-Z (SEQ ID NO: 4515), X-RLPWWR-C(Sx)-YT*WVREREGNTKQR-Z (SEQ ID NO: 4516), X-RLPWWR-C(Sx)-YT*WVREREVNTKQR-Z (SEQ ID NO: 4517), X-RLPWWR-C(Sx)-YT*WVRERQGNTKQR-Z (SEQ ID NO: 4518), X-RLPWWR-C(Sx)-YT*WVRERQVNTKQR-Z (SEQ ID NO: 4519), X-RLPWWR-C(Sx)-YT*WVVARDGNTKQR-Z (SEQ ID NO: 4520), X-RLPWWR-C(Sx)-YT*WVVARDVNTKQR-Z (SEQ ID NO: 4521), X-RLPWWR-C(Sx)-YT*WVVAREGNTKQR-Z (SEQ ID NO: 4522), X-RLPWWR-C(Sx)-YT*WVVAREVNTKQR-Z (SEQ ID NO: 4523), X-RLPWWR-C(Sx)-YT*WVVARQGNTKQR-Z (SEQ ID NO: 4524), X-RLPWWR-C(Sx)-YT*WVVARQVNTKQR-Z (SEQ ID NO: 4525), X-RLPWWR-C(Sx)-YT*WVVERDGNTKQR-Z (SEQ ID NO: 4526), X-RLPWWR-C(Sx)-YT*WVVERDVNTKQR-Z (SEQ ID NO: 4527), X-RLPWWR-C(Sx)-YT*WVVEREGNTKQR-Z (SEQ ID NO: 4528), X-RLPWWR-C(Sx)-YT*WVVEREVNTKQR-Z (SEQ ID NO: 4529), X-RLPWWR-C(Sx)-YT*WVVERQGNTKQR-Z (SEQ ID NO: 4530), and X-RLPWWR-C(Sx)-YT*WVVERQVNTKQR-Z (SEQ ID NO: 4531); wherein X— is H or acetyl; and Z is OH or NH2.

[0174] In some embodiments, the metal-binding compound of the present invention is selected from the group consisting of: X-RLR-C(Sx)-AS*FRRR-Z (SEQ ID NO: 4532), X-RNGKR-C(Sx)-PT*HTSRVGT-Z (SEQ ID NO: 4533), X-RNGKRT*P-C(Sx)-HTSRVGT-Z (SEQ ID NO: 4534), X-RNGKRTP-C(Sx)-HT*SRVGT-Z (SEQ ID NO: 4535), X-RNGKRTPT*H-C(Sx)-SRVGT-Z (SEQ ID NO: 4536), X-RNGKRTPTHT*S-C(Sx)-VGT-Z (SEQ ID NO: 4537), X-RNPWWR-C(Sx)-YT*WVVERDVNTKQR-Z (SEQ ID NO: 4538), X-RNR-C(Sx)-AS*FRRR-Z (SEQ ID NO: 4539), X-RPASVPPS*P-C(Sx)-LSRHS[pS]HQRR-Z (SEQ ID NO: 4540), X-RPASVPPS*P-C(Sx)-LSRHS[pS]HQR-Z (SEQ ID NO: 4541), X-RPASVPPSP-C(Sx)-LS*RHS[pS]HQRR-Z (SEQ ID NO: 4542), X-RPASVPPSP-C(Sx)-LS*RHS[pS]HQR-Z (SEQ ID NO: 4543), X-RPHFP-C(Sx)-FS*YSASGTA-Z (SEQ ID NO: 4544), X-RPPWWR-C(Sx)-YT*WVVERDVNTKQR-Z (SEQ ID NO: 4545), X-RPR-C(Sx)-AS*FRRR-Z (SEQ ID NO: 4546), X-RQPWWR-C(Sx)-YT*WVVERDVNTKQR-Z (SEQ ID NO: 4547), X-RQR-C(Sx)-AS*FRRR-Z (SEQ ID NO: 4548), X-RQREGFGRQS*M-C(Sx)-EKR-Z (SEQ ID NO: 4549), X-RR[Nle]-C(Sx)-AS*FRRR-Z (SEQ ID NO: 4550), X-RRA-C(Sx)-AS*FRRR-Z (SEQ ID NO: 4551), X-RR-C(Sx)-AS*FRRR-Z (SEQ ID NO: 4552), X-RR-C(Sx)-AS*FRR-Z (SEQ ID NO: 4553), X-RR-C(Sx)-AS*FR-Z (SEQ ID NO: 4554), X-RR-C(Sx)-LS*FAEG-Z (SEQ ID NO: 4555), X-RR-C(Sx)-LS*FAEPG-Z (SEQ ID NO: 4556), X-RRD-C(Sx)-AS*FRRR-Z (SEQ ID NO: 4557), X-RRE-C(Sx)-AS*FRRR-Z (SEQ ID NO: 4558), X-RRF-C(Sx)-AS*FRRR-Z (SEQ ID NO: 4559), X-RRG-C(Sx)-AS*FRRR-Z (SEQ ID NO: 4560), X-RRGGR-C(Sx)-RS*RSPDRRRR-Z (SEQ ID NO: 4561), X-RRGGRRRS*R-C(Sx)-PDRRRR-Z (SEQ ID NO: 4562), X-RRGGRRRSRS*P-C(Sx)-RRRR-Z (SEQ ID NO: 4563), X-RRH-C(Sx)-AS*FRRR-Z (SEQ ID NO: 4564), X-RRHYY-C(Sx)-DT*HTNTYYLRTFGHNTRR-Z (SEQ ID NO: 4565), X-RRHYYYDT*H-C(Sx)-NTYYLRTFGHNTRR-Z (SEQ ID NO: 4566), X-RRHYYYDTH-C(Sx)-NT*YYLRTFGHNTRR-Z (SEQ ID NO: 4567), X-RRHYYYDTHTNT*Y-C(Sx)-LRTFGHNTRR-Z (SEQ ID NO: 4568), X-RRHYYYDTHTNTYY-C(Sx)-RT*FGHNTRR-Z (SEQ ID NO: 4569), X-RRHYYYDTHTNTYYLRT*F-C(Sx)-HNTRR-Z (SEQ ID NO: 4570), X-RRI-C(Sx)-AS*FRRR-Z (SEQ ID NO: 4571), X-RRK-C(Sx)-AS*FRRR-Z (SEQ ID NO: 4572), X-RRK-C(Sx)-AT*RR[Nle]RF-Z (SEQ ID NO: 4573), X-RRK-C(Sx)-AT*RRMRF-Z (SEQ ID NO: 4574), X-RRK-C(Sx)-RT*[Nle]R[Nle]RF-Z (SEQ ID NO: 4575), X-RRK-C(Sx)-RT*MRMRF-Z (SEQ ID NO: 4576), X-RRKIAT*R-C(Sx)-[Nle]RF-Z (SEQ ID NO: 4577), X-RRKIAT*R-C(Sx)-MRF-Z (SEQ ID NO: 4578), X-RRKIRT*[Nle]-C(Sx)-[Nle]RF-Z (SEQ ID NO: 4579), X-RRKIRT*M-C(Sx)-MRF-Z (SEQ ID NO: 4580), X-RRL-C(Sx)-AS*FRRR-Z (SEQ ID NO: 4581), X-RRN-C(Sx)-AS*FRRR-Z (SEQ ID NO: 4582), X-RRPASVPPS*P-C(Sx)-LSRHS[pS]HQRR-Z (SEQ ID NO: 4583), X-RRPASVPPS*P-C(Sx)-LSRHS[pS]HQR-Z (SEQ ID NO: 4584), X-RRPASVPPSP-C(Sx)-LS*RHS[pS]HQRR-Z (SEQ ID NO: 4585), X-RRPASVPPSP-C(Sx)-LS*RHS[pS]HQR-Z (SEQ ID NO: 4586), X-RRP-C(Sx)-AS*FRRR-Z (SEQ ID NO: 4587), and X-RRPWWR-C(Sx)-YT*WVVERDVNTKQR-Z (SEQ ID NO: 4588); wherein X— is H or acetyl; and Z is OH or NH2.

[0175] In some embodiments, the metal-binding compound of the present invention is selected from the group consisting of: X-RRQ-C(Sx)-AS*FRRR-Z (SEQ ID NO: 4589), X-RRR-C(Sx)-[Nle]S*FRRR-Z (SEQ ID NO: 4590), X-RRR-C(Sx)-A[Nle]FRRR-Z (SEQ ID NO: 4591), X-RRR-C(Sx)-AS*[Nle]RRR-Z (SEQ ID NO: 4592), X-RRR-C(Sx)-AS*ARRR-Z (SEQ ID NO: 4593), X-RRR-C(Sx)-AS*DRRR-Z (SEQ ID NO: 4594), X-RRR-C(Sx)-AS*ERRR-Z (SEQ ID NO: 4595), X-RRR-C(Sx)-AS*F[Nle]RR-Z (SEQ ID NO: 4596), X-RRR-C(Sx)-AS*FARR-Z (SEQ ID NO: 4597), X-RRR-C(Sx)-AS*FDRR-Z (SEQ ID NO: 4598), X-RRR-C(Sx)-AS*FERR-Z (SEQ ID NO: 4599), X-RRR-C(Sx)-AS*FFRR-Z (SEQ ID NO: 4600), X-RRR-C(Sx)-AS*FGRR-Z (SEQ ID NO: 4601), X-RRR-C(Sx)-AS*FHRR-Z (SEQ ID NO: 4602), X-RRR-C(Sx)-AS*FIRR-Z (SEQ ID NO: 4603), X-RRR-C(Sx)-AS*FKRR-Z (SEQ ID NO: 4604), X-RRR-C(Sx)-AS*FLRR-Z (SEQ ID NO: 4605), X-RRR-C(Sx)-AS*FNRR-Z (SEQ ID NO: 4606), X-RRR-C(Sx)-AS*FPRR-Z (SEQ ID NO: 4607), X-RRR-C(Sx)-AS*FQRR-Z (SEQ ID NO: 4608), X-RRR-C(Sx)-AS*FR[Nle]R-Z (SEQ ID NO: 4609), X-RRR-C(Sx)-AS*FRAR-Z (SEQ ID NO: 4610), X-RRR-C(Sx)-AS*FRDR-Z (SEQ ID NO: 4611), X-RRR-C(Sx)-AS*FRER-Z (SEQ ID NO: 4612), X-RRR-C(Sx)-AS*FRFR-Z (SEQ ID NO: 4613), X-RRR-C(Sx)-AS*FRGR-Z (SEQ ID NO: 4614), X-RRR-C(Sx)-AS*FRHR-Z (SEQ ID NO: 4615), X-RRR-C(Sx)-AS*FRIR-Z (SEQ ID NO: 4616), X-RRR-C(Sx)-AS*FRKR-Z (SEQ ID NO: 4617), X-RRR-C(Sx)-AS*FRLR-Z (SEQ ID NO: 4618), X-RRR-C(Sx)-AS*FRNR-Z (SEQ ID NO: 4619), X-RRR-C(Sx)-AS*FRPR-Z (SEQ ID NO: 4620), X-RRR-C(Sx)-AS*FRQR-Z (SEQ ID NO: 4621), X-RRR-C(Sx)-AS*FRR[Nle]-Z (SEQ ID NO: 4622), X-RRR-C(Sx)-AS*FRRA-Z (SEQ ID NO: 4623), X-RRR-C(Sx)-AS*FRRD-Z (SEQ ID NO: 4624), X-RRR-C(Sx)-AS*FRRE-Z (SEQ ID NO: 4625), X-RRR-C(Sx)-AS*FRRF-Z (SEQ ID NO: 4626), X-RRR-C(Sx)-AS*FRRG-Z (SEQ ID NO: 4627), X-RRR-C(Sx)-AS*FRRH-Z (SEQ ID NO: 4628), X-RRR-C(Sx)-AS*FRRI-Z (SEQ ID NO: 4629), X-RRR-C(Sx)-AS*FRRK-Z (SEQ ID NO: 4630), X-RRR-C(Sx)-AS*FRRL-Z (SEQ ID NO: 4631), X-RRR-C(Sx)-AS*FRRN-Z (SEQ ID NO: 4632), X-RRR-C(Sx)-AS*FRRP-Z (SEQ ID NO: 4633), X-RRR-C(Sx)-AS*FRRQ-Z (SEQ ID NO: 4634), X-RRR-C(Sx)-AS*FRRR-Z (SEQ ID NO: 4635), X-RRR-C(Sx)-AS*FRRV-Z (SEQ ID NO: 4636), X-RRR-C(Sx)-AS*FRRW-Z (SEQ ID NO: 4637), X-RRR-C(Sx)-AS*FRR-Z (SEQ ID NO: 4638), X-RRR-C(Sx)-AS*FRVR-Z (SEQ ID NO: 4639), X-RRR-C(Sx)-AS*FRWR-Z (SEQ ID NO: 4640), X-RRR-C(Sx)-AS*FR-Z (SEQ ID NO: 4641), X-RRR-C(Sx)-AS*FVRR-Z (SEQ ID NO: 4642), X-RRR-C(Sx)-AS*FWRR-Z (SEQ ID NO: 4643), X-RRR-C(Sx)-AS*GRRR-Z (SEQ ID NO: 4644), X-RRR-C(Sx)-AS*HRRR-Z (SEQ ID NO: 4645), X-RRR-C(Sx)-AS*IRRR-Z (SEQ ID NO: 4646), X-RRR-C(Sx)-AS*KRRR-Z (SEQ ID NO: 4647), X-RRR-C(Sx)-AS*LRRR-Z (SEQ ID NO: 4648), X-RRR-C(Sx)-AS*NRRR-Z (SEQ ID NO: 4649), X-RRR-C(Sx)-AS*PRRR-Z (SEQ ID NO: 4650), X-RRR-C(Sx)-AS*QRRR-Z (SEQ ID NO: 4651), X-RRR-C(Sx)-AS*RRRR-Z (SEQ ID NO: 4652), X-RRR-C(Sx)-AS*VRRR-Z (SEQ ID NO: 4653), X-RRR-C(Sx)-AS*WRRR-Z (SEQ ID NO: 4654), X-RRR-C(Sx)-DS*FRRR-Z (SEQ ID NO: 4655), X-RRR-C(Sx)-ES*FRRR-Z (SEQ ID NO: 4656), X-RRR-C(Sx)-FS*FRRR-Z (SEQ ID NO: 4657), X-RRR-C(Sx)-FS*LRRKA-Z (SEQ ID NO: 4658), X-RRR-C(Sx)-GS*FRRR-Z (SEQ ID NO: 4659), X-RRR-C(Sx)-HS*FRRR-Z (SEQ ID NO: 4660), X-RRR-C(Sx)-IS*FRRR-Z (SEQ ID NO: 4661), X-RRR-C(Sx)-KS*FRRR-Z (SEQ ID NO: 4662), X-RRR-C(Sx)-LS*FRRR-Z (SEQ ID NO: 4663), X-RRR-C(Sx)-NS*FRRR-Z (SEQ ID NO: 4664), X-RRR-C(Sx)-PS*FRRR-Z (SEQ ID NO: 4665), X-RRR-C(Sx)-QS*FRRR-Z (SEQ ID NO: 4666), X-RRR-C(Sx)-RS*FRRR-Z (SEQ ID NO: 4667), X-RRR-C(Sx)-VS*FRRR-Z (SEQ ID NO: 4668), X-RRR-C(Sx)-WS*FRRR-Z (SEQ ID NO: 4669), X-RRRLS-C(Sx)-VS*LTGVSTI-Z (SEQ ID NO: 1157), X-RRRLSNVS*L-C(Sx)-GVSTI-Z (SEQ ID NO: 1156), X-RRRPASVPPS*P-C(Sx)-LSRHS[pS]HQRR-Z (SEQ ID NO: 4670), X-RRRPASVPPS*P-C(Sx)-LSRHS[pS]HQR-Z (SEQ ID NO: 4671), X-RRRPASVPPSP-C(Sx)-LS*RHS[pS]HQRR-Z (SEQ ID NO: 4672), X-RRRPASVPPSP-C(Sx)-LS*RHS[pS]HQR-Z (SEQ ID NO: 4673), X-RRRQFS*L-C(Sx)-RKA-Z (SEQ ID NO: 4674), X-RRV-C(Sx)-AS*FRRR-Z (SEQ ID NO: 4675), X-RRVSGNNS*P-C(Sx)-LSNGG-Z (SEQ ID NO: 1112), X-RRVSGNNSP-C(Sx)-LS*NGG-Z (SEQ ID NO: 4676), X-RRW-C(Sx)-AS*FRRR-Z (SEQ ID NO: 4677), X-RSKSAPTS*P-C(Sx)-DQEIK-Z (SEQ ID NO: 1052), X-RSRSRS*R-C(Sx)-R-Z (SEQ ID NO: 4678), X-RSRSRSRS*R-C(Sx)-R-Z (SEQ ID NO: 4679), X-RSRSRSRSNS*R-C(Sx)-RSYSPRRS-Z (SEQ ID NO: 4680), X-RSRSRSRSNSR-C(Sx)-RS*YSPRRS-Z (SEQ ID NO: 4681), X-RSRSRSRSNSRS*R-C(Sx)-YSPRRS-Z (SEQ ID NO: 4682), X-RSRSRSRSNSRSR-C(Sx)-YS*PRRS-Z (SEQ ID NO: 4683), X-RSRSRSRSRS*R-C(Sx)-RAR-Z (SEQ ID NO: 4684), X-RSRSRSRSRS*R-C(Sx)-RGR-Z (SEQ ID NO: 4685), X-RSRSRSRSRS*R-C(Sx)-R-Z (SEQ ID NO: 4686), X-RSRSRSRSRSNSRSRS*Y-C(Sx)-PR-Z (SEQ ID NO: 4687), X-RSRSRSRSRSRS*R-C(Sx)-R-Z (SEQ ID NO: 4688), X-RTDSLAAT*P-C(Sx)-AAK-Z (SEQ ID NO: 1111), X-RVG-C(Sx)-AS*SLENTVDLHISNSHP-Z (SEQ ID NO: 4689), X-RVGGASS*L-C(Sx)-NTVDLHISNSHP-Z (SEQ ID NO: 4690), X-RVGGASSL-C(Sx)-NT*VDLHISNSHP-Z (SEQ ID NO: 4691), X-RVPWWR-C(Sx)-YT*WVVERDVNTKQR-Z (SEQ ID NO: 4692), X-RVR-C(Sx)-AS*FRRR-Z (SEQ ID NO: 4693), X-RWPWWR-C(Sx)-YT*WVVERDVNTKQR-Z (SEQ ID NO: 4694), and X-RWR-C(Sx)-AS*FRRR-Z (SEQ ID NO: 4695); wherein X— is H or acetyl; and Z is OH or NH2.

[0176] In some embodiments, the metal-binding compound of the present invention is selected from the group consisting of: X-S*R-C(Sx)-LSVSSLPGLED-Z (SEQ ID NO: 4696), X-S*R-C(Sx)-SSPHQ[pS]EDEEE-Z (SEQ ID NO: 4697), X-SAKS*R-C(Sx)-QTAPVP[Nle]PD-Z (SEQ ID NO: 4698), X-SAKSR-C(Sx)-QT*APVP[Nle]PD-Z (SEQ ID NO: 4699), X-SAKSRLQT*A-C(Sx)-VP[Nle]PD-Z (SEQ ID NO: 4700), X-SANLLS*P-C(Sx)-PA-Z (SEQ ID NO: 4701), X-SEGLS*M-C(Sx)-NYIGLINRIKK-Z (SEQ ID NO: 4702), X-SFITPPTT*P-C(Sx)-LRRHT-Z (SEQ ID NO: 1092), X-SGDED-C(Sx)-SS*IADMDFSAL-Z (SEQ ID NO: 4703), X-SGDEDFSS*I-C(Sx)-DMDFSALLSQ-Z (SEQ ID NO: 4704), X-SGDY[Nle]P[Nle]S*P-C(Sx)-SVSAP-Z (SEQ ID NO: 4705), X-SGLS*R-C(Sx)-DSPEPFGHY-Z (SEQ ID NO: 4706), X-SGLSR-C(Sx)-DS*PEPFGHY-Z (SEQ ID NO: 4707), X-SGLSRRDS*P-C(Sx)-PFGHY-Z (SEQ ID NO: 4708), X-SGQL-C(Sx)-DS*[Nle]ANSFV-Z (SEQ ID NO: 4709), X-SGQLIDS*[Nle]-C(Sx)-NSFV-Z (SEQ ID NO: 4710), X-SGQLIDS[Nle]ANS*F-C(Sx)-G-Z (SEQ ID NO: 4711), X-SGQLIDS[Nle]-C(Sx)-NS*FV-Z (SEQ ID NO: 4712), X-SGRPR-C(Sx)-TS*FAESSKP-Z (SEQ ID NO: 4713), X-SGRPRTTS*F-C(Sx)-ESSKP-Z (SEQ ID NO: 4714), X-SGVEV-C(Sx)-VT*PTRTEII-Z (SEQ ID NO: 1061), X-SGVEVRVT*P-C(Sx)-RTEII-Z (SEQ ID NO: 1060), X-SGVEVRVTP-C(Sx)-RT*EII-Z (SEQ ID NO: 4715), X-SIKS*E-C(Sx)-ISPPRDR[Nle]T-Z (SEQ ID NO: 4716), X-SIKSE-C(Sx)-IS*PPRDR[Nle]T-Z (SEQ ID NO: 4717), X-SIKSEPIS*P-C(Sx)-RDR[Nle]T-Z (SEQ ID NO: 4718), X-SIMQQ-C(Sx)-DS*PHVVKYYKKK-Z (SEQ ID NO: 4719), X-SKS*S-C(Sx)-NGTSGDREDK-Z (SEQ ID NO: 4720), X-SLD-C(Sx)-SS*LSLSLSSANSLYDD-Z (SEQ ID NO: 4721), X-SLDSSSLS*L-C(Sx)-LSSANSLYDD-Z (SEQ ID NO: 4722), X-SLDSSSLSL-C(Sx)-LS*SANSLYDD-Z (SEQ ID NO: 4723), X-SNGRR-C(Sx)-RS*PTQSFRF-Z (SEQ ID NO: 1037), X-SNGRRKRS*P-C(Sx)-QSFRF-Z (SEQ ID NO: 1036), X-SNGRRKRSP-C(Sx)-QS*FRF-Z (SEQ ID NO: 4724), X-SNSLKKSS*A-C(Sx)-LKKIL-Z (SEQ ID NO: 1180), X-SNT*GQ-C(Sx)-ISPG[Nle]KRRI-Z (SEQ ID NO: 4725), X-SNTGQAIS*P-C(Sx)-[Nle]KRRI-Z (SEQ ID NO: 4726), X-SNTGQAIS*PG-C(Sx)-KRRI-Z (SEQ ID NO: 4727), X-SNTGQ-C(Sx)-IS*PG[Nle]KRRI-Z (SEQ ID NO: 4728), X-SPAR-C(Sx)-SS*YSEANEP-Z (SEQ ID NO: 4729), X-SPLSDPSS*P-C(Sx)-ASEDF-Z (SEQ ID NO: 1182), X-SPLSDPSSP-C(Sx)-AS*EDF-Z (SEQ ID NO: 4730), X-SPS-C(Sx)-RS*RSRSRSRSPGRPSK-Z (SEQ ID NO: 4731), X-SPSRRS*R-C(Sx)-RSRSRSPGRPSK-Z (SEQ ID NO: 4732), X-SPSRRSR-C(Sx)-RS*RSRSPGRPSK-Z (SEQ ID NO: 4733), X-SPSRRSRS*R-C(Sx)-RSRSPGRPSK-Z (SEQ ID NO: 4734), X-SPSRRSRSR-C(Sx)-RS*RSPGRPSK-Z (SEQ ID NO: 4735), X-SPSRRSRSRS*R-C(Sx)-RSPGRPSK-Z (SEQ ID NO: 4736), X-SPSRRSRSRSR-C(Sx)-RS*PGRPSK-Z (SEQ ID NO: 4737), X-SPSRRSRSRSRS*R-C(Sx)-PGRPSK-Z (SEQ ID NO: 4738), X-SPSRRSRSRSRSRS*P-C(Sx)-RPSK-Z (SEQ ID NO: 4739), X-SR-C(Sx)-LS*VSSLPGLED-Z (SEQ ID NO: 4740), X-SR-C(Sx)-SS*PHQ[pS]EDEEE-Z (SEQ ID NO: 4741), X-SRDPVART*S-C(Sx)-LQTPA-Z (SEQ ID NO: 1104), X-SRLRD-C(Sx)-PS*APLEAPE-Z (SEQ ID NO: 1171), X-SRRS*G-C(Sx)-SSPSYVAVT-Z (SEQ ID NO: 4742), X-SRRSG-C(Sx)-SS*PSYVAVT-Z (SEQ ID NO: 1063), X-SRRSGLSS*P-C(Sx)-YVAVT-Z (SEQ ID NO: 1062), X-SRSHSAKT*P-C(Sx)-FSVQS-Z (SEQ ID NO: 1069), X-SRSHSAKT*PG-C(Sx)-SVQS-Z (SEQ ID NO: 4743), X-SRSHSAKTP-C(Sx)-FS*VQS-Z (SEQ ID NO: 4744), X-SRSHS-C(Sx)-KT*PGFSVQS-Z (SEQ ID NO: 4745), X-SRSRS*R-C(Sx)-RAPGRPSKG-Z (SEQ ID NO: 4746), X-SRSRS*R-C(Sx)-RGPGRPSKG-Z (SEQ ID NO: 4747), X-SRSRS*R-C(Sx)-RSPGRPSKG-Z (SEQ ID NO: 4748), X-SRSRSNSRSRS*Y-C(Sx)-PRRSRGS-Z (SEQ ID NO: 4749), X-SRSRSNSRSRSYS*P-C(Sx)-RSRGS-Z (SEQ ID NO: 4750), X-SRSRSNSRSRSYSP-C(Sx)-RS*RGS-Z (SEQ ID NO: 4751), X-SRSRSR-C(Sx)-RS*PGRPSKG-Z (SEQ ID NO: 4752), X-SRSRSRSNSRSRSYS*P-C(Sx)-RSR-Z (SEQ ID NO: 4753), X-SRSRSRSNSRSRSYSP-C(Sx)-RS*R-Z (SEQ ID NO: 4754), X-SRSRSRSRS*P-C(Sx)-RPSKGR-Z (SEQ ID NO: 4755), X-SRSRSRSRS*P-C(Sx)-RPSKG-Z (SEQ ID NO: 4756), X-SRSRSRSRSNSRSRS*Y-C(Sx)-PRR-Z (SEQ ID NO: 4757), X-SRSRSRSRSNSRSRSYS*P-C(Sx)-R-Z (SEQ ID NO: 4758), X-SSKIRRLS*A-C(Sx)-KQQ-Z (SEQ ID NO: 4759), X-SSKRAKAKTTKKRPQRAT*S-C(Sx)-VFS-Z (SEQ ID NO: 4760), X-SSKRAKAKTTKKRPQRATS*N-C(Sx)-FS-Z (SEQ ID NO: 998), X-SSKRAKAKTTKKRPQRATSN-C(Sx)-FS*-Z (SEQ ID NO: 4761), X-SSLET-C(Sx)-ST*QELYSIP-Z (SEQ ID NO: 4762), X-SSPS-C(Sx)-RS*RSRSRSRS-Z (SEQ ID NO: 4763), X-SSPSRR-C(Sx)-RS*RSRSRS-Z (SEQ ID NO: 4764), X-SSPSRRS*R-C(Sx)-RSRSRS-Z (SEQ ID NO: 4765), X-SSPSRRSR-C(Sx)-RS*RSRS-Z (SEQ ID NO: 4766), X-SSPSRRSRSRS*R-C(Sx)-RA-Z (SEQ ID NO: 4767), X-SSPSRRSRSRS*R-C(Sx)-RG-Z (SEQ ID NO: 4768), X-SSPSRRSRSRS*R-C(Sx)-RS-Z (SEQ ID NO: 4769), X-SSPSRRSRSRSR-C(Sx)-RS*-Z (SEQ ID NO: 4770), and X-SSPSRRSRSRSRS*R-C(Sx)-Z (SEQ ID NO: 4771); wherein X— is H or acetyl; and Z is OH or NH2.

[0177] In some embodiments, the metal-binding compound of the present invention is selected from the group consisting of: X-SSPSRRSRSRSRSRS*P-C(Sx)-RPSKGR-Z (SEQ ID NO: 4772), X-SSPSRRSRSRSRSRS*P-C(Sx)-RPSKG-Z (SEQ ID NO: 4773), X-STPSEPLS*P-C(Sx)-SSLGE-Z (SEQ ID NO: 4774), X-STPSEPLSP-C(Sx)-SS*LGE-Z (SEQ ID NO: 4775), X-STSVT-C(Sx)-HS*PSSPVGSKKK-Z (SEQ ID NO: 4776), X-SYYGRDRS*P-C(Sx)-RRATA-Z (SEQ ID NO: 4777), X-TDGEDADYT-C(Sx)-FT*NQQ-Z (SEQ ID NO: 4778), X-TEERL-C(Sx)-SS*PVYEDAA-Z (SEQ ID NO: 1035), X-TFDS*L-C(Sx)-SSPSSATPH-Z (SEQ ID NO: 4779), X-TFDSL-C(Sx)-SS*PSSATPH-Z (SEQ ID NO: 1065), X-TFDSLPSS*P-C(Sx)-SATPH-Z (SEQ ID NO: 1064), X-TFGNKLDT*F-C(Sx)-GSP-Z (SEQ ID NO: 4780), X-TFGNKLDTF-C(Sx)-GS*P-Z (SEQ ID NO: 4781), X-TFLPVPEYI-C(Sx)-QS*VPK-Z (SEQ ID NO: 4782), X-TKLKPPRT*P-C(Sx)-PPSRK-Z (SEQ ID NO: 1093), X-TPPEE-C(Sx)-PS*PSASSLG-Z (SEQ ID NO: 1027), X-TPPEELPS*P-C(Sx)-ASSLG-Z (SEQ ID NO: 1026), X-TPPEELPSP-C(Sx)-AS*SLG-Z (SEQ ID NO: 4783), X-TPPQEHIS*P-C(Sx)-ITNEV-Z (SEQ ID NO: 1053), X-TPPQEHISP-C(Sx)-IT*NEV-Z (SEQ ID NO: 4784), X-TPVVS-C(Sx)-AT*PTLPGQG-Z (SEQ ID NO: 4785), X-TTGT*K-C(Sx)-NTPTSSVPSKKK-Z (SEQ ID NO: 4786), X-TTGTK-C(Sx)-NT*PTSSVPSKKK-Z (SEQ ID NO: 4787), X-TTLHR-C(Sx)-VS*PGAPQRP-Z (SEQ ID NO: 1140), X-TTLHRNVS*P-C(Sx)-APQRP-Z (SEQ ID NO: 1139), X-TTLHRNVS*PG-C(Sx)-PQRP-Z (SEQ ID NO: 4788), X-TVGNKLDT*F-C(Sx)-GSP-Z (SEQ ID NO: 4789), X-TVGNKLDTF-C(Sx)-GS*P-Z (SEQ ID NO: 4790), X-VA-C(Sx)-QT*P[pT]PTRFLKN-Z (SEQ ID NO: 1023), X-VADQTPT*P-C(Sx)-RFLKN-Z (SEQ ID NO: 1022), X-VAKTTKKRPQRATS*N-C(Sx)-FS-Z (SEQ ID NO: 4791), X-VAKTTKKRPQRATSN-C(Sx)-FS*-Z (SEQ ID NO: 4792), X-VANPLMA-C(Sx)-GT*LTRRHQNGRF-Z (SEQ ID NO: 4793), X-V-C(Sx)-DS*LRRKAK-Z (SEQ ID NO: 4794), X-V-C(Sx)-LS*PGPF-Z (SEQ ID NO: 4795), X-VDGFT-C(Sx)-KS*VRKAQRQ-Z (SEQ ID NO: 4796), X-VDGFTRKS*V-C(Sx)-KAQRQ-Z (SEQ ID NO: 4797), X-VDLHISNS*H-C(Sx)-LSLTSDQYK-Z (SEQ ID NO: 4798), X-VDLHISNSH-C(Sx)-LS*LTSDQYK-Z (SEQ ID NO: 4799), X-VDLHISNSHPL-C(Sx)-LT*SDQYK-Z (SEQ ID NO: 4800), X-VEVDP[Nle]LT*P-C(Sx)-ERHLN-Z (SEQ ID NO: 4801), X-VEVDP-C(Sx)-LT*PEERHLN-Z (SEQ ID NO: 1045), X-VKAEPAHT*A-C(Sx)-SVAAK-Z (SEQ ID NO: 1173), X-VKRPQRAT*S-C(Sx)-VFAMF-Z (SEQ ID NO: 4802), X-VKS*P-C(Sx)-KEKAKSPEK-Z (SEQ ID NO: 4803), X-VKSPAKEKAKS*P-C(Sx)-K-Z (SEQ ID NO: 4804), X-VKSPAKEK-C(Sx)-KS*PEK-Z (SEQ ID NO: 4805), X-VLLR-C(Sx)-SS*RRIRR-Z (SEQ ID NO: 4806), X-VLPWWR-C(Sx)-YT*WVVERDVNTKQR-Z (SEQ ID NO: 4807), X-VLSRQ-C(Sx)-TS*PVSGING-Z (SEQ ID NO: 1051), X-VLSRQITS*P-C(Sx)-SGING-Z (SEQ ID NO: 1050), X-VNTRA-C(Sx)-PS*QHSSPAV-Z (SEQ ID NO: 1177), X-VP-C(Sx)-LT*PGGRR-Z (SEQ ID NO: 4808), X-VQGI-C(Sx)-FS*QPTSPDHAKKK-Z (SEQ ID NO: 4809), X-VQREGFGRQS*M-C(Sx)-EKR-Z (SEQ ID NO: 4810), X-VRR-C(Sx)-AS*FRRR-Z (SEQ ID NO: 4811), X-VSGQL-C(Sx)-DS*MANSFVGTRSYKKK-Z (SEQ ID NO: 1003), X-VSYEDPPT*A-C(Sx)-AAVEW-Z (SEQ ID NO: 1075), and X-WAKTTKKRPQRATS*N-C(Sx)-FS-Z (SEQ ID NO: 4812); wherein X is H or acetyl; and Z is OH or NH2.

[0178] In some embodiments, the metal-binding compound of the present invention is selected from the group consisting of: X-WAKTTKKRPQRATSN-C(Sx)-FS*-Z (SEQ ID NO: 4813), X-WANPLMA-C(Sx)-GT*LTRRHQNGRF-Z (SEQ ID NO: 4814), X-W-C(Sx)-DS*LRRKAK-Z (SEQ ID NO: 4815), X-W-C(Sx)-LS*PGPF-Z (SEQ ID NO: 4816), X-WD-C(Sx)-DS*DDDDDAAAKKK-Z (SEQ ID NO: 1195), X-WD-C(Sx)-DS*DDDDDAAA-Z (SEQ ID NO: 1194), X-WKRPQRAT*S-C(Sx)-VFAMF-Z (SEQ ID NO: 4817), X-WLLR-C(Sx)-SS*RRIRR-Z (SEQ ID NO: 4818), X-WLPWWR-C(Sx)-YT*WVVERDVNTKQR-Z (SEQ ID NO: 4819), X-WQREGFGRQS*M-C(Sx)-EKR-Z (SEQ ID NO: 4820), X-WR-C(Sx)-YT*LRRARQGNTKQR-Z (SEQ ID NO: 4821), X-WRR-C(Sx)-AS*FRRR-Z (SEQ ID NO: 4822), X-Y[Nle]P[Nle]SPKS*V-C(Sx)-APQQI-Z (SEQ ID NO: 4823), X-YANWMAAS*I-C(Sx)-LDGKKK-Z (SEQ ID NO: 4824), X-YANWM-C(Sx)-AS*IYLDGKKK-Z (SEQ ID NO: 4825), X-YKRRYVET*P-C(Sx)-VHISS-Z (SEQ ID NO: 1097), X-YRRAAVPPSPSLS*R-C(Sx)-SSPHQ[pS]EDEEE-Z (SEQ ID NO: 4826), X-YRRAAVPPSPSLSR-C(Sx)-SS*PHQ[pS]EDEEE-Z (SEQ ID NO: 4827), X-YSHKGHLS*E-C(Sx)-LVTKW-Z (SEQ ID NO: 1168), X-[Nle]EEEEY*I-C(Sx)-Z (SEQ ID NO: 4828), X-[Nle]EEEY*I-C(Sx)-IV-Z (SEQ ID NO: 4829), X-[Nle]EPIY*I-C(Sx)-VP-Z (SEQ ID NO: 4830), X-[Nle]VSETDDY*A-C(Sx)-IIDEE-Z (SEQ ID NO: 4831), X-ADEY*L-C(Sx)-PQQ-Z (SEQ ID NO: 4832), X-ADPDHDHTGFLTEY*V-C(Sx)-TRWRR-Z (SEQ ID NO: 4833), X-AEE-C(Sx)-IY*GEFEAKKKK-Z (SEQ ID NO: 4834), X-AEEEEY*I-C(Sx)-Z (SEQ ID NO: 4835), X-AEEEY*I-C(Sx)-IV-Z (SEQ ID NO: 4836), X-AENAEY*L-C(Sx)-VA-Z (SEQ ID NO: 945), X-AGKEQTYY*Q-C(Sx)-RHLGD-Z (SEQ ID NO: 981), X-AKAA-C(Sx)-GY*VKPQIKQVV-Z (SEQ ID NO: 4837), X-AKAADGY*V-C(Sx)-PQIKQVV-Z (SEQ ID NO: 4838), X-AKA-C(Sx)-DGY*VKPQIKQVV-Z (SEQ ID NO: 4839), X-ARKRERAY*SA[dP]-C(Sx)-G-Z (SEQ ID NO: 4840), X-ARKRERAY*SD[dP]-C(Sx)-G-Z (SEQ ID NO: 4841), X-ARKRERAY*SE-C(Sx)-G-Z (SEQ ID NO: 4842), X-ARKRERAY*SF[Nle]-C(Sx)-G-Z (SEQ ID NO: 4843), X-ARPLVEFY*E-C(Sx)-IKKYE-Z (SEQ ID NO: 927), X-AVLADVSY*L-C(Sx)-AMEKS-Z (SEQ ID NO: 926), X-AVSETDDY*A-C(Sx)-IIDEE-Z (SEQ ID NO: 4844), X-C(Sx)-FY*TLRRARQGNTKQR-Z (SEQ ID NO: 4845), X-DADEY*L-C(Sx)-PQQG-Z (SEQ ID NO: 939), X-DE-C(Sx)-DY*EEPDEP-Z (SEQ ID NO: 4846), X-DEEDY*E-C(Sx)-PDEP-Z (SEQ ID NO: 4847), X-DEEEEY*I-C(Sx)-Z (SEQ ID NO: 4848), X-DEEEY*I-C(Sx)-IV-Z (SEQ ID NO: 4849), X-DEPE-C(Sx)-DY*EEVLEPED-Z (SEQ ID NO: 4850), X-DEPE-C(Sx)-DY*FEWLEPED-Z (SEQ ID NO: 4851), X-DEPEGDY*E-C(Sx)-VLEPED-Z (SEQ ID NO: 4852), X-DEPEGDY*F-C(Sx)-WLEPED-Z (SEQ ID NO: 4853), X-DGDGQVNY*E-C(Sx)-FVQMM-Z (SEQ ID NO: 929), X-DGSDHPYY*N-C(Sx)-IPSKM-Z (SEQ ID NO: 978), X-DLI[Nle]K-C(Sx)-DY*ELVSTKPTR-Z (SEQ ID NO: 4854), X-DLI[Nle]KEDY*E-C(Sx)-VSTKPTR-Z (SEQ ID NO: 4855), X-DLIMK-C(Sx)-DY*ELVSTKPTR-Z (SEQ ID NO: 4856), X-DLIMKEDY*E-C(Sx)-VSTKPTR-Z (SEQ ID NO: 4857), X-DNDP-C(Sx)-EY*ITLDED-Z (SEQ ID NO: 4858), X-DNDP-C(Sx)-RY*IRTEDE-Z (SEQ ID NO: 4859), X-DNDPDEY*I-C(Sx)-LDED-Z (SEQ ID NO: 4860), X-DNDPDRY*I-C(Sx)-TEDE-Z (SEQ ID NO: 4861), X-DRHEQEDEPE-C(Sx)-DY*EEVLEPE-Z (SEQ ID NO: 4862), X-DRHEQEDEPE-C(Sx)-DY*FEWLEPE-Z (SEQ ID NO: 4863), X-DRHEQEDEPEGDY*E-C(Sx)-VLEPE-Z (SEQ ID NO: 4864), X-DRHEQEDEPEGDY*F-C(Sx)-WLEPE-Z (SEQ ID NO: 4865), and X-DVSETDDY*A-C(Sx)-IIDEE-Z (SEQ ID NO: 4866); wherein X is H or acetyl; and Z is OH or NH2.

[0179] In some embodiments, the metal-binding compound of the present invention is selected from the group consisting of: X-DVVDADEY*L-C(Sx)-PQQGF-Z (SEQ ID NO: 938), X-ED-C(Sx)-DY*EWPSA-Z (SEQ ID NO: 4867), X-EDE-C(Sx)-IY*EELDEP-Z (SEQ ID NO: 4868), X-EDEDIY*E-C(Sx)-LDEP-Z (SEQ ID NO: 4869), X-EDEG-C(Sx)-RY*LKLEED-Z (SEQ ID NO: 4870), X-EDEGDRY*L-C(Sx)-LEED-Z (SEQ ID NO: 4871), X-EDGGDDIY*E-C(Sx)-IIKVE-Z (SEQ ID NO: 986), X-EDPDY*E-C(Sx)-PSA-Z (SEQ ID NO: 4872), X-EDPDY*F-C(Sx)-FG-Z (SEQ ID NO: 251), X-EDPDY*F-C(Sx)-FK-Z (SEQ ID NO: 252), X-EDPDY*F-C(Sx)-FP-Z (SEQ ID NO: 253), X-EDPDY*F-C(Sx)-IG-Z (SEQ ID NO: 254), X-EDPDY*F-C(Sx)-IK-Z (SEQ ID NO: 255), X-EDPDY*F-C(Sx)-IP-Z (SEQ ID NO: 256), X-EDPDY*F-C(Sx)-MG-Z (SEQ ID NO: 257), X-EDPDY*F-C(Sx)-MK-Z (SEQ ID NO: 258), X-EDPDY*F-C(Sx)-MP-Z (SEQ ID NO: 259), X-EDPDY*F-C(Sx)-VG-Z (SEQ ID NO: 260), X-EDPDY*F-C(Sx)-VK-Z (SEQ ID NO: 261), X-EDPDY*F-C(Sx)-VP-Z (SEQ ID NO: 262), X-EDPDY*I-C(Sx)-FG-Z (SEQ ID NO: 263), X-EDPDY*I-C(Sx)-FK-Z (SEQ ID NO: 264), X-EDPDY*I-C(Sx)-FP-Z (SEQ ID NO: 265), X-EDPDY*I-C(Sx)-IG-Z (SEQ ID NO: 266), X-EDPDY*I-C(Sx)-IK-Z (SEQ ID NO: 267), X-EDPDY*I-C(Sx)-IP-Z (SEQ ID NO: 268), X-EDPDY*I-C(Sx)-MG-Z (SEQ ID NO: 269), X-EDPDY*I-C(Sx)-MK-Z (SEQ ID NO: 270), X-EDPDY*I-C(Sx)-MP-Z (SEQ ID NO: 271), X-EDPDY*I-C(Sx)-VG-Z (SEQ ID NO: 272), X-EDPDY*I-C(Sx)-VK-Z (SEQ ID NO: 273), X-EDPDY*I-C(Sx)-VP-Z (SEQ ID NO: 274), X-EDPDY*V-C(Sx)-FG-Z (SEQ ID NO: 275), X-EDPDY*V-C(Sx)-FK-Z (SEQ ID NO: 276), X-EDPDY*V-C(Sx)-FP-Z (SEQ ID NO: 277), X-EDPDY*V-C(Sx)-IG-Z (SEQ ID NO: 278), X-EDPDY*V-C(Sx)-IK-Z (SEQ ID NO: 279), X-EDPDY*V-C(Sx)-IP-Z (SEQ ID NO: 280), X-EDPDY*V-C(Sx)-MG-Z (SEQ ID NO: 281), X-EDPDY*V-C(Sx)-MK-Z (SEQ ID NO: 282), X-EDPDY*V-C(Sx)-MP-Z (SEQ ID NO: 283), X-EDPDY*V-C(Sx)-VG-Z (SEQ ID NO: 284), X-EDPDY*V-C(Sx)-VK-Z (SEQ ID NO: 285), X-EDPDY*V-C(Sx)-VP-Z (SEQ ID NO: 286), X-EDPEY*F-C(Sx)-FG-Z (SEQ ID NO: 287), X-EDPEY*F-C(Sx)-FK-Z (SEQ ID NO: 288), X-EDPEY*F-C(Sx)-FP-Z (SEQ ID NO: 289), X-EDPEY*F-C(Sx)-IG-Z (SEQ ID NO: 290), X-EDPEY*F-C(Sx)-IK-Z (SEQ ID NO: 291), X-EDPEY*F-C(Sx)-IP-Z (SEQ ID NO: 292), X-EDPEY*F-C(Sx)-MG-Z (SEQ ID NO: 293), X-EDPEY*F-C(Sx)-MK-Z (SEQ ID NO: 294), X-EDPEY*F-C(Sx)-MP-Z (SEQ ID NO: 295), X-EDPEY*F-C(Sx)-VG-Z (SEQ ID NO: 296), X-EDPEY*F-C(Sx)-VK-Z (SEQ ID NO: 297), X-EDPEY*F-C(Sx)-VP-Z (SEQ ID NO: 298), X-EDPEY*I-C(Sx)-FG-Z (SEQ ID NO: 299), X-EDPEY*I-C(Sx)-FK-Z (SEQ ID NO: 300), X-EDPEY*I-C(Sx)-FP-Z (SEQ ID NO: 301), X-EDPEY*I-C(Sx)-IG-Z (SEQ ID NO: 302), X-EDPEY*I-C(Sx)-IK-Z (SEQ ID NO: 303), X-EDPEY*I-C(Sx)-IP-Z (SEQ ID NO: 304), X-EDPEY*I-C(Sx)-MG-Z (SEQ ID NO: 305), X-EDPEY*I-C(Sx)-MK-Z (SEQ ID NO: 306), X-EDPEY*I-C(Sx)-MP-Z (SEQ ID NO: 307), X-EDPEY*I-C(Sx)-VG-Z (SEQ ID NO: 308), X-EDPEY*I-C(Sx)-VK-Z (SEQ ID NO: 309), X-EDPEY*I-C(Sx)-VP-Z (SEQ ID NO: 310), X-EDPEY*V-C(Sx)-FG-Z (SEQ ID NO: 311), X-EDPEY*V-C(Sx)-FK-Z (SEQ ID NO: 312), X-EDPEY*V-C(Sx)-FP-Z (SEQ ID NO: 313), X-EDPEY*V-C(Sx)-IG-Z (SEQ ID NO: 314), X-EDPEY*V-C(Sx)-IK-Z (SEQ ID NO: 315), X-EDPEY*V-C(Sx)-IP-Z (SEQ ID NO: 316), X-EDPEY*V-C(Sx)-MG-Z (SEQ ID NO: 317), X-EDPEY*V-C(Sx)-MK-Z (SEQ ID NO: 318), X-EDPEY*V-C(Sx)-MP-Z (SEQ ID NO: 319), X-EDPEY*V-C(Sx)-VG-Z (SEQ ID NO: 320), X-EDPEY*V-C(Sx)-VK-Z (SEQ ID NO: 321), and X-EDPEY*V-C(Sx)-VP-Z (SEQ ID NO: 322); wherein X— is H or acetyl; and Z is OH or NH2.

[0180] In some embodiments, the metal-binding compound of the present invention is selected from the group consisting of: X-EDPIY*F-C(Sx)-FG-Z (SEQ ID NO: 323), X-EDPIY*F-C(Sx)-FK-Z (SEQ ID NO: 324), X-EDPIY*F-C(Sx)-FP-Z (SEQ ID NO: 325), X-EDPIY*F-C(Sx)-IG-Z (SEQ ID NO: 326), X-EDPIY*F-C(Sx)-IK-Z (SEQ ID NO: 327), X-EDPIY*F-C(Sx)-IP-Z (SEQ ID NO: 328), X-EDPIY*F-C(Sx)-MG-Z (SEQ ID NO: 329), X-EDPIY*F-C(Sx)-MK-Z (SEQ ID NO: 330), X-EDPIY*F-C(Sx)-MP-Z (SEQ ID NO: 331), X-EDPIY*F-C(Sx)-VG-Z (SEQ ID NO: 332), X-EDPIY*F-C(Sx)-VK-Z (SEQ ID NO: 333), X-EDPIY*F-C(Sx)-VP-Z (SEQ ID NO: 334), X-EDPIY*I-C(Sx)-FG-Z (SEQ ID NO: 335), X-EDPIY*I-C(Sx)-FK-Z (SEQ ID NO: 336), X-EDPIY*I-C(Sx)-FP-Z (SEQ ID NO: 337), X-EDPIY*I-C(Sx)-IG-Z (SEQ ID NO: 338), X-EDPIY*I-C(Sx)-IK-Z (SEQ ID NO: 339), X-EDPIY*I-C(Sx)-IP-Z (SEQ ID NO: 340), X-EDPIY*I-C(Sx)-MG-Z (SEQ ID NO: 341), X-EDPIY*I-C(Sx)-MK-Z (SEQ ID NO: 342), X-EDPIY*I-C(Sx)-MP-Z (SEQ ID NO: 343), X-EDPIY*I-C(Sx)-VG-Z (SEQ ID NO: 344), X-EDPIY*I-C(Sx)-VK-Z (SEQ ID NO: 345), X-EDPIY*V-C(Sx)-FG-Z (SEQ ID NO: 347), X-EDPIY*V-C(Sx)-FK-Z (SEQ ID NO: 348), X-EDPIY*V-C(Sx)-FP-Z (SEQ ID NO: 349), X-EDPIY*V-C(Sx)-IG-Z (SEQ ID NO: 350), X-EDPIY*V-C(Sx)-IK-Z (SEQ ID NO: 351), X-EDPIY*V-C(Sx)-IP-Z (SEQ ID NO: 352), X-EDPIY*V-C(Sx)-MG-Z (SEQ ID NO: 353), X-EDPIY*V-C(Sx)-MK-Z (SEQ ID NO: 354), X-EDPIY*V-C(Sx)-MP-Z (SEQ ID NO: 355), X-EDPIY*V-C(Sx)-VG-Z (SEQ ID NO: 356), X-EDPIY*V-C(Sx)-VK-Z (SEQ ID NO: 357), X-EDPIY*V-C(Sx)-VP-Z (SEQ ID NO: 358), X-EDSFLQRY*S-C(Sx)-DPTGA-Z (SEQ ID NO: 940), X-EEEEEY*I-C(Sx)-Z (SEQ ID NO: 4873), X-EEEEY*[Nle]-C(Sx)-VG-Z (SEQ ID NO: 4874), X-EEEEY*[Nle]Q[dP]-C(Sx)-G-Z (SEQ ID NO: 4875), X-EEEEY*[Nle]Q-C(Sx)-VG-Z (SEQ ID NO: 4876), X-EEEEY*A-C(Sx)-VG-Z (SEQ ID NO: 4877), X-EEEEY*AQ[dP]-C(Sx)-G-Z (SEQ ID NO: 4878), X-EEEEY*AQ-C(Sx)-VG-Z (SEQ ID NO: 4879), X-EEEEY*D-C(Sx)-VG-Z (SEQ ID NO: 4880), X-EEEEY*DQ[dP]-C(Sx)-G-Z (SEQ ID NO: 4881), X-EEEEY*DQ-C(Sx)-VG-Z (SEQ ID NO: 4882), X-EEEEY*E-C(Sx)-VG-Z (SEQ ID NO: 4883), X-EEEEY*EQ[dP]-C(Sx)-G-Z (SEQ ID NO: 4884), X-EEEEY*EQ-C(Sx)-VG-Z (SEQ ID NO: 4885), X-EEEEY*F-C(Sx)-VG-Z (SEQ ID NO: 4886), X-EEEEY*FQ[dP]-C(Sx)-G-Z (SEQ ID NO: 4887), X-EEEEY*FQ-C(Sx)-VG-Z (SEQ ID NO: 4888), X-EEEEY*G-C(Sx)-VG-Z (SEQ ID NO: 4889), X-EEEEY*GG[dP]-C(Sx)-G-Z (SEQ ID NO: 4890), X-EEEEY*GG-C(Sx)-VG-Z (SEQ ID NO: 4891), X-EEEEY*GGG-C(Sx)-G-Z (SEQ ID NO: 4892), X-EEEEY*GQ[dP]-C(Sx)-G-Z (SEQ ID NO: 4893), X-EEEEY*GQ-C(Sx)-VG-Z (SEQ ID NO: 4894), X-EEEEY*H-C(Sx)-VG-Z (SEQ ID NO: 4895), X-EEEEY*HQ[dP]-C(Sx)-G-Z (SEQ ID NO: 4896), X-EEEEY*HQ-C(Sx)-VG-Z (SEQ ID NO: 4897), X-EEEEY*I[Nle][dP]-C(Sx)-G-Z (SEQ ID NO: 4898), X-EEEEY*I[Nle]-C(Sx)-VG-Z (SEQ ID NO: 4899), X-EEEEY*IA[dP]-C(Sx)-G-Z (SEQ ID NO: 4900), X-EEEEY*IA-C(Sx)-VG-Z (SEQ ID NO: 4901), X-EEEEY*I-C(Sx)-EV-Z (SEQ ID NO: 4902), X-EEEEY*I-C(Sx)-IV-Z (SEQ ID NO: 1), X-EEEEY*ID[dP]-C(Sx)-G-Z (SEQ ID NO: 4903), X-EEEEY*ID-C(Sx)-VG-Z (SEQ ID NO: 4904), X-EEEEY*IE[dP]-C(Sx)-G-Z (SEQ ID NO: 4905), X-EEEEY*IE-C(Sx)-VG-Z (SEQ ID NO: 4906), X-EEEEY*IF[dP]-C(Sx)-G-Z (SEQ ID NO: 4907), X-EEEEY*IF-C(Sx)-VG-Z (SEQ ID NO: 4908), X-EEEEY*IG[dP]-C(Sx)-G-Z (SEQ ID NO: 4909), X-EEEEY*IG-C(Sx)-VG-Z (SEQ ID NO: 4910), X-EEEEY*IH[dP]-C(Sx)-G-Z (SEQ ID NO: 4911), X-EEEEY*IH-C(Sx)-VG-Z (SEQ ID NO: 4912), X-EEEEY*II[dP]-C(Sx)-G-Z (SEQ ID NO: 4913), X-EEEEY*II-C(Sx)-VG-Z (SEQ ID NO: 4914), X-EEEEY*IK[dP]-C(Sx)-G-Z (SEQ ID NO: 4915), X-EEEEY*IK-C(Sx)-VG-Z (SEQ ID NO: 4916), X-EEEEY*IL[dP]-C(Sx)-G-Z (SEQ ID NO: 4917), X-EEEEY*IL-C(Sx)-VG-Z (SEQ ID NO: 4918), X-EEEEY*IN[dP]-C(Sx)-G-Z (SEQ ID NO: 4919), X-EEEEY*IN-C(Sx)-VG-Z (SEQ ID NO: 4920), X-EEEEY*IP[dP]-C(Sx)-G-Z (SEQ ID NO: 4921), X-EEEEY*IP-C(Sx)-VG-Z (SEQ ID NO: 4922), X-EEEEY*IQ[dP]-C(Sx)-G-Z (SEQ ID NO: 4923), X-EEEEY*IQ[Nle]-C(Sx)-G-Z (SEQ ID NO: 4924), X-EEEEY*IQA-C(Sx)-G-Z (SEQ ID NO: 4925), X-EEEEY*IQ-C(Sx)-VG-Z (SEQ ID NO: 4926), X-EEEEY*IQD-C(Sx)-G-Z (SEQ ID NO: 4927), X-EEEEY*IQE-C(Sx)-G-Z (SEQ ID NO: 4928), X-EEEEY*IQF-C(Sx)-G-Z (SEQ ID NO: 4929), X-EEEEY*IQG-C(Sx)-G-Z (SEQ ID NO: 4930), X-EEEEY*IQH-C(Sx)-G-Z (SEQ ID NO: 4931), X-EEEEY*IQI-C(Sx)-G-Z (SEQ ID NO: 4932), X-EEEEY*IQK-C(Sx)-G-Z (SEQ ID NO: 4933), X-EEEEY*IQL-C(Sx)-G-Z (SEQ ID NO: 4934), X-EEEEY*IQN-C(Sx)-G-Z (SEQ ID NO: 4935), X-EEEEY*IQP-C(Sx)-G-Z (SEQ ID NO: 4936), X-EEEEY*IQQ-C(Sx)-G-Z (SEQ ID NO: 4937), X-EEEEY*IQR-C(Sx)-G-Z (SEQ ID NO: 4938), X-EEEEY*IQV-C(Sx)-G-Z (SEQ ID NO: 4939); and X-EEEEY*IQW-C(Sx)-G-Z (SEQ ID NO: 4940); wherein X— is H or acetyl; and Z is OH or NH2.

[0181] In some embodiments, the metal-binding compound of the present invention is selected from the group consisting of: X-EEEEY*IR[dP]-C(Sx)-G-Z (SEQ ID NO: 4941), X-EEEEY*IR-C(Sx)-VG-Z (SEQ ID NO: 4942), X-EEEEY*IV[dP]-C(Sx)-G-Z (SEQ ID NO: 4943), X-EEEEY*IV-C(Sx)-VG-Z (SEQ ID NO: 4944), X-EEEEY*IW[dP]-C(Sx)-G-Z (SEQ ID NO: 4945), X-EEEEY*IW-C(Sx)-VG-Z (SEQ ID NO: 4946), X-EEEEY*K-C(Sx)-VG-Z (SEQ ID NO: 4947), X-EEEEY*KQ[dP]-C(Sx)-G-Z (SEQ ID NO: 4948), X-EEEEY*KQ-C(Sx)-VG-Z (SEQ ID NO: 4949), X-EEEEY*L-C(Sx)-VG-Z (SEQ ID NO: 4950), X-EEEEY*LQ[dP]-C(Sx)-G-Z (SEQ ID NO: 4951), X-EEEEY*LQ-C(Sx)-VG-Z (SEQ ID NO: 4952), X-EEEEY*N-C(Sx)-VG-Z (SEQ ID NO: 4953), X-EEEEY*NQ[dP]-C(Sx)-G-Z (SEQ ID NO: 4954), X-EEEEY*NQ-C(Sx)-VG-Z (SEQ ID NO: 4955), X-EEEEY*P-C(Sx)-VG-Z (SEQ ID NO: 4956), X-EEEEY*PQ[dP]-C(Sx)-G-Z (SEQ ID NO: 4957), X-EEEEY*PQ-C(Sx)-VG-Z (SEQ ID NO: 4958), X-EEEEY*Q-C(Sx)-VG-Z (SEQ ID NO: 4959), X-EEEEY*QQ[dP]-C(Sx)-G-Z (SEQ ID NO: 4960), X-EEEEY*QQ-C(Sx)-VG-Z (SEQ ID NO: 4961), X-EEEEY*R-C(Sx)-VG-Z (SEQ ID NO: 4962), X-EEEEY*RQ[dP]-C(Sx)-G-Z (SEQ ID NO: 4963), X-EEEEY*RQ-C(Sx)-VG-Z (SEQ ID NO: 4964), X-EEEEY*V-C(Sx)-VG-Z (SEQ ID NO: 4965), X-EEEEY*VQ[dP]-C(Sx)-G-Z (SEQ ID NO: 4966), X-EEEEY*VQ-C(Sx)-VG-Z (SEQ ID NO: 4967), X-EEEEY*W-C(Sx)-VG-Z (SEQ ID NO: 4968), X-EEEEY*WQ[dP]-C(Sx)-G-Z (SEQ ID NO: 4969), X-EEEEY*WQ-C(Sx)-VG-Z (SEQ ID NO: 4970), X-EEEIY*F-C(Sx)-FWG-Z (SEQ ID NO: 922), X-EEEY*I-C(Sx)-[Nle]V-Z (SEQ ID NO: 4971), X-EEEY*I-C(Sx)-AV-Z (SEQ ID NO: 4972), X-EEEY*I-C(Sx)-DV-Z (SEQ ID NO: 4973), X-EEEY*I-C(Sx)-FV-Z (SEQ ID NO: 4974), X-EEEY*I-C(Sx)-GV-Z (SEQ ID NO: 4975), X-EEEY*I-C(Sx)-HV-Z (SEQ ID NO: 4976), X-EEEY*I-C(Sx)-I[Nle]-Z (SEQ ID NO: 4977), X-EEEY*I-C(Sx)-IA-Z (SEQ ID NO: 4978), X-EEEY*I-C(Sx)-ID-Z (SEQ ID NO: 4979), X-EEEY*I-C(Sx)-IE-Z (SEQ ID NO: 4980), X-EEEY*I-C(Sx)-IF-Z (SEQ ID NO: 4981), X-EEEY*I-C(Sx)-IG-Z (SEQ ID NO: 4982), X-EEEY*I-C(Sx)-IH-Z (SEQ ID NO: 4983), X-EEEY*I-C(Sx)-II-Z (SEQ ID NO: 4984), X-EEEY*I-C(Sx)-IK-Z (SEQ ID NO: 4985), X-EEEY*I-C(Sx)-IL-Z (SEQ ID NO: 4986), X-EEEY*I-C(Sx)-IM-Z (SEQ ID NO: 4987), X-EEEY*I-C(Sx)-IN-Z (SEQ ID NO: 4988), X-EEEY*I-C(Sx)-IP-Z (SEQ ID NO: 4989), X-EEEY*I-C(Sx)-IQ-Z (SEQ ID NO: 4990), X-EEEY*I-C(Sx)-IR-Z (SEQ ID NO: 4991), X-EEEY*I-C(Sx)-IW-Z (SEQ ID NO: 4992), X-EEEY*I-C(Sx)-KV-Z (SEQ ID NO: 4993), X-EEEY*I-C(Sx)-LV-Z (SEQ ID NO: 4994), X-EEEY*I-C(Sx)-MV-Z (SEQ ID NO: 4995), X-EEEY*I-C(Sx)-NV-Z (SEQ ID NO: 4996), X-EEEY*I-C(Sx)-PV-Z (SEQ ID NO: 4997), X-EEEY*I-C(Sx)-QV-Z (SEQ ID NO: 4998), X-EEEY*I-C(Sx)-RV-Z (SEQ ID NO: 4999), X-EEEY*I-C(Sx)-VV-Z (SEQ ID NO: 5000), X-EEEY*I-C(Sx)-WV-Z (SEQ ID NO: 5001), X-EEPDY*E-C(Sx)-QP-Z (SEQ ID NO: 5002), X-EEPDY*F-C(Sx)-FG-Z (SEQ ID NO: 359), X-EEPDY*F-C(Sx)-FK-Z (SEQ ID NO: 360), X-EEPDY*F-C(Sx)-FP-Z (SEQ ID NO: 361), X-EEPDY*F-C(Sx)-IG-Z (SEQ ID NO: 362), X-EEPDY*F-C(Sx)-IK-Z (SEQ ID NO: 363), X-EEPDY*F-C(Sx)-IP-Z (SEQ ID NO: 364), X-EEPDY*F-C(Sx)-MG-Z (SEQ ID NO: 365), X-EEPDY*F-C(Sx)-MK-Z (SEQ ID NO: 366), X-EEPDY*F-C(Sx)-MP-Z (SEQ ID NO: 367), X-EEPDY*F-C(Sx)-VG-Z (SEQ ID NO: 368), X-EEPDY*F-C(Sx)-VK-Z (SEQ ID NO: 369), X-EEPDY*F-C(Sx)-VP-Z (SEQ ID NO: 370), X-EEPDY*I-C(Sx)-FG-Z (SEQ ID NO: 371), X-EEPDY*I-C(Sx)-FK-Z (SEQ ID NO: 372), X-EEPDY*I-C(Sx)-FP-Z (SEQ ID NO: 373), X-EEPDY*I-C(Sx)-IG-Z (SEQ ID NO: 374), X-EEPDY*I-C(Sx)-IK-Z (SEQ ID NO: 375), X-EEPDY*I-C(Sx)-IP-Z (SEQ ID NO: 376), X-EEPDY*I-C(Sx)-MG-Z (SEQ ID NO: 377), X-EEPDY*I-C(Sx)-MK-Z (SEQ ID NO: 378), X-EEPDY*I-C(Sx)-MP-Z (SEQ ID NO: 379), X-EEPDY*I-C(Sx)-VG-Z (SEQ ID NO: 380), X-EEPDY*I-C(Sx)-VK-Z (SEQ ID NO: 381), X-EEPDY*V-C(Sx)-FG-Z (SEQ ID NO: 383), X-EEPDY*V-C(Sx)-FK-Z (SEQ ID NO: 384), X-EEPDY*V-C(Sx)-FP-Z (SEQ ID NO: 385), X-EEPDY*V-C(Sx)-IG-Z (SEQ ID NO: 386), X-EEPDY*V-C(Sx)-IK-Z (SEQ ID NO: 387), X-EEPDY*V-C(Sx)-IP-Z (SEQ ID NO: 388), X-EEPDY*V-C(Sx)-MG-Z (SEQ ID NO: 389), X-EEPDY*V-C(Sx)-MK-Z (SEQ ID NO: 390), X-EEPDY*V-C(Sx)-MP-Z (SEQ ID NO: 391), X-EEPDY*V-C(Sx)-VG-Z (SEQ ID NO: 392), X-EEPDY*V-C(Sx)-VK-Z (SEQ ID NO: 393), X-EEPDY*V-C(Sx)-VP-Z (SEQ ID NO: 394), X-EEPEY*F-C(Sx)-FG-Z (SEQ ID NO: 395), X-EEPEY*F-C(Sx)-FK-Z (SEQ ID NO: 396), X-EEPEY*F-C(Sx)-FP-Z (SEQ ID NO: 397), X-EEPEY*F-C(Sx)-IG-Z (SEQ ID NO: 398), X-EEPEY*F-C(Sx)-IK-Z (SEQ ID NO: 399), X-EEPEY*F-C(Sx)-IP-Z (SEQ ID NO: 400), X-EEPEY*F-C(Sx)-MG-Z (SEQ ID NO: 401), X-EEPEY*F-C(Sx)-MK-Z (SEQ ID NO: 402), X-EEPEY*F-C(Sx)-MP-Z (SEQ ID NO: 403), X-EEPEY*F-C(Sx)-VG-Z (SEQ ID NO: 404), X-EEPEY*F-C(Sx)-VK-Z (SEQ ID NO: 405), and X-EEPEY*F-C(Sx)-VP-Z (SEQ ID NO: 406); wherein X— is H or acetyl; and Z is OH or NH2.

[0182] In some embodiments, the metal-binding compound of the present invention is selected from the group consisting of: X-EEPEY*I-C(Sx)-FG-Z (SEQ ID NO: 407), X-EEPEY*I-C(Sx)-FK-Z (SEQ ID NO: 408), X-EEPEY*I-C(Sx)-FP-Z (SEQ ID NO: 409), X-EEPEY*I-C(Sx)-IG-Z (SEQ ID NO: 410), X-EEPEY*I-C(Sx)-IK-Z (SEQ ID NO: 411), X-EEPEY*I-C(Sx)-IP-Z (SEQ ID NO: 412), X-EEPEY*I-C(Sx)-MG-Z (SEQ ID NO: 413), X-EEPEY*I-C(Sx)-MK-Z (SEQ ID NO: 414), X-EEPEY*I-C(Sx)-MP-Z (SEQ ID NO: 415), X-EEPEY*I-C(Sx)-VG-Z (SEQ ID NO: 416), X-EEPEY*I-C(Sx)-VK-Z (SEQ ID NO: 417), X-EEPEY*V-C(Sx)-FG-Z (SEQ ID NO: 419), X-EEPEY*V-C(Sx)-FK-Z (SEQ ID NO: 420), X-EEPEY*V-C(Sx)-FP-Z (SEQ ID NO: 421), X-EEPEY*V-C(Sx)-IG-Z (SEQ ID NO: 422), X-EEPEY*V-C(Sx)-IK-Z (SEQ ID NO: 423), X-EEPEY*V-C(Sx)-IP-Z (SEQ ID NO: 424), X-EEPEY*V-C(Sx)-MG-Z (SEQ ID NO: 425), X-EEPEY*V-C(Sx)-MK-Z (SEQ ID NO: 426), X-EEPEY*V-C(Sx)-MP-Z (SEQ ID NO: 427), X-EEPEY*V-C(Sx)-VG-Z (SEQ ID NO: 428), X-EEPEY*V-C(Sx)-VK-Z (SEQ ID NO: 429), and X-EEPEY*V-C(Sx)-VP-Z (SEQ ID NO: 430), X-EEPIY*F-C(Sx)-FG-Z (SEQ ID NO: 458), X-EEPIY*F-C(Sx)-FK-Z (SEQ ID NO: 459), X-EEPIY*F-C(Sx)-FP-Z (SEQ ID NO: 461), X-EEPIY*F-C(Sx)-IG-Z (SEQ ID NO: 462), X-EEPIY*F-C(Sx)-IK-Z (SEQ ID NO: 463), X-EEPIY*F-C(Sx)-IP-Z (SEQ ID NO: 465), X-EEPIY*F-C(Sx)-MG-Z (SEQ ID NO: 469), X-EEPIY*F-C(Sx)-MK-Z (SEQ ID NO: 470), X-EEPIY*F-C(Sx)-MP-Z (SEQ ID NO: 472), X-EEPIY*F-C(Sx)-VG-Z (SEQ ID NO: 473), X-EEPIY*F-C(Sx)-VK-Z (SEQ ID NO: 474), X-EEPIY*I-C(Sx)-FG-Z (SEQ ID NO: 483), X-EEPIY*I-C(Sx)-FK-Z (SEQ ID NO: 484), X-EEPIY*I-C(Sx)-IG-Z (SEQ ID NO: 487), X-EEPIY*I-C(Sx)-IK-Z (SEQ ID NO: 488), X-EEPIY*I-C(Sx)-MG-Z (SEQ ID NO: 494), X-EEPIY*I-C(Sx)-MK-Z (SEQ ID NO: 495), X-EEPIY*V-C(Sx)-FG-Z (SEQ ID NO: 531), X-EEPIY*V-C(Sx)-FK-Z (SEQ ID NO: 532), X-EEPIY*V-C(Sx)-FP-Z (SEQ ID NO: 534), X-EEPIY*V-C(Sx)-IG-Z (SEQ ID NO: 535), X-EEPIY*V-C(Sx)-IK-Z (SEQ ID NO: 536), X-EEPIY*V-C(Sx)-IP-Z (SEQ ID NO: 538), X-EEPIY*V-C(Sx)-MG-Z (SEQ ID NO: 542), X-EEPIY*V-C(Sx)-MK-Z (SEQ ID NO: 543), X-EEPIY*V-C(Sx)-MP-Z (SEQ ID NO: 545), X-EEPIY*V-C(Sx)-VG-Z (SEQ ID NO: 546), X-EEPIY*V-C(Sx)-VK-Z (SEQ ID NO: 547), X-EEPPD-C(Sx)-QY*[pY]NDFPGK-Z (SEQ ID NO: 974), X-EEPPD-C(Sx)-QY*YNDFPGK-Z (SEQ ID NO: 973), X-EGRNPGFY*V-C(Sx)-ANPMP-Z (SEQ ID NO: 967), X-EGSFESRY*Q-C(Sx)-PFEDF-Z (SEQ ID NO: 965), X-EPIQEANY*V-C(Sx)-MTPGT-Z (SEQ ID NO: 955), X-EPPDHQYY*N-C(Sx)-FPGKE-Z (SEQ ID NO: 975), X-EQEDEPE-C(Sx)-DY*EEVLE-Z (SEQ ID NO: 5003), X-EQEDEPE-C(Sx)-DY*FEWLE-Z (SEQ ID NO: 5004), X-EQEDEPEGDY*E-C(Sx)-VLE-Z (SEQ ID NO: 5005), X-EQEDEPEGDY*F-C(Sx)-WLE-Z (SEQ ID NO: 5006), X-EVSETDDY*A-C(Sx)-IIDEE-Z (SEQ ID NO: 5007), X-FAGKE-C(Sx)-TY*[pY]QGRHLG-Z (SEQ ID NO: 980), X-FAGKE-C(Sx)-TY*YQGRHLG-Z (SEQ ID NO: 979), X-FD[Nle]DR-C(Sx)-IY*RMSFFRK-Z (SEQ ID NO: 5008), X-FD[Nle]DRDIY*R-C(Sx)-SFFRK-Z (SEQ ID NO: 5009), X-FDKDGNGY*I-C(Sx)-AAELR-Z (SEQ ID NO: 930), X-FDMDR-C(Sx)-IY*RMSFFRK-Z (SEQ ID NO: 5010), X-FDMDRDIY*R-C(Sx)-SFFRK-Z (SEQ ID NO: 5011), X-FEEEEY*I-C(Sx)-Z (SEQ ID NO: 5012), X-FEEEY*I-C(Sx)-IV-Z (SEQ ID NO: 5013), X-FTDRL-C(Sx)-QY*ISTRGLG-Z (SEQ ID NO: 919), X-FTDRLQQY*I-C(Sx)-TRGLG-Z (SEQ ID NO: 920), and X-FVSETDDY*A-C(Sx)-IIDEE-Z (SEQ ID NO: 5014); wherein X is H or acetyl; and Z is OH or NH2.

[0183] In some embodiments, the metal-binding compound of the present invention is selected from the group consisting of: X-FYEEIKKY*E-C(Sx)-LETEE-Z (SEQ ID NO: 928), X-GAEDPEY*I-C(Sx)-IPAKKKG-Z (SEQ ID NO: 5015), X-GAEEPDY*I-C(Sx)-FGAKKKG-Z (SEQ ID NO: 5016), X-GAEEPEY*I-C(Sx)-FGAKKKG-Z (SEQ ID NO: 5017), X-GAEEPEY*I-C(Sx)-VKAKKKG-Z (SEQ ID NO: 5018), X-GAEEPIY*I-C(Sx)-[Nle]PAKKKG-Z (SEQ ID NO: 5019), X-GAEEPIY*I-C(Sx)-FGAKKKG-Z (SEQ ID NO: 5020), X-GAEEPIY*V-C(Sx)-FGAKKKG-Z (SEQ ID NO: 5021), X-GAEEPIY*V-C(Sx)-VKAKKKG-Z (SEQ ID NO: 5022), X-GAEEPIY*V-C(Sx)-VPAKKKG-Z (SEQ ID NO: 5023), X-GAGEE-C(Sx)-DY*[pY][pY]IWAGKKKK-Z (SEQ ID NO: 914), X-GC(Xx)-NY*RGYSLGNWV-Z (SEQ ID NO: 921), X-GDGSD-C(Sx)-PY*[pY]NSIPSK-Z (SEQ ID NO: 977), X-GDGSD-C(Sx)-PY*YNSIPSK-Z (SEQ ID NO: 976), X-GEEEEY*I-C(Sx)-Z (SEQ ID NO: 5024), X-GEEEY*I-C(Sx)-IV-Z (SEQ ID NO: 5025), X-GGPEPGPY*A-C(Sx)-PSVNT-Z (SEQ ID NO: 936), X-GLPWWR-C(Sx)-YT*WVVERDVNTKQR-Z (SEQ ID NO: 5026), X-GSNQEEAY*V-C(Sx)-[Nle]SSFY-Z (SEQ ID NO: 5027), X-GVSETDDY*A-C(Sx)-IIDEE-Z (SEQ ID NO: 5028), X-HDLGEDIY*D-C(Sx)-VP-Z (SEQ ID NO: 985), X-HEEEEY*I-C(Sx)-Z (SEQ ID NO: 5029), X-HEEEY*I-C(Sx)-IV-Z (SEQ ID NO: 5030), X-HRIDG-C(Sx)-TY*VIKRVKY*-Z (SEQ ID NO: 5031), X-HRIDGKTY*V-C(Sx)-KRVKY-Z (SEQ ID NO: 5032), X-HVNATY*V-C(Sx)-VKSVAP-Z (SEQ ID NO: 5033), X-HVSETDDY*A-C(Sx)-IIDEE-Z (SEQ ID NO: 5034), X-IEEEEY*I-C(Sx)-Z (SEQ ID NO: 5035), X-IEEEY*I-C(Sx)-IV-Z (SEQ ID NO: 5036), X-IENEEQEY*V-C(Sx)-TVKSS-Z (SEQ ID NO: 925), X-IGTAE-C(Sx)-DY*GALYEGR-Z (SEQ ID NO: 966), X-ISLDNPDY*Q-C(Sx)-DFFPK-Z (SEQ ID NO: 944), X-IVSETDDY*A-C(Sx)-IIDEE-Z (SEQ ID NO: 5037), X-KAEEEEY*I-C(Sx)-LVA-Z (SEQ ID NO: 996), X-KEEEEY*I-C(Sx)-Z (SEQ ID NO: 5038), X-KEEEY*I-C(Sx)-IV-Z (SEQ ID NO: 5039), X-KEVHKSGY*L-C(Sx)-SERLI-Z (SEQ ID NO: 950), X-KGDKQVEY*L-C(Sx)-LDLDS-Z (SEQ ID NO: 957), X-KKAEEEEY*I-C(Sx)-LVA-Z (SEQ ID NO: 995), X-KKEEEIY*F-C(Sx)-FWG-Z (SEQ ID NO: 923), X-KKGE-C(Sx)-IY*AAPFA-Z (SEQ ID NO: 5040), X-KKKAEEEEY*I-C(Sx)-LVA-Z (SEQ ID NO: 994), X-KKKAEEEEY*I-C(Sx)-LV-Z (SEQ ID NO: 5041), X-KKKAEEEEY*I-C(Sx)-L-Z (SEQ ID NO: 910), X-KKKAEEEEY*I-C(Sx)-Z (SEQ ID NO: 911), X-KKKAEPLPPSY*V-C(Sx)-AS-Z (SEQ ID NO: 5042), X-KKKDEQIY*W-C(Sx)-IA-Z (SEQ ID NO: 997), X-KKKDNVLINTY*S-C(Sx)-VLKIS-Z (SEQ ID NO: 5043), X-KKKEEEIY*F-C(Sx)-FWG-Z (SEQ ID NO: 917), X-KKKKE-C(Sx)-IY*FFFG-Z (SEQ ID NO: 5044), X-KKKKEEEIY*F-C(Sx)-FWG-Z (SEQ ID NO: 918), X-KKKLSRSLY*F-C(Sx)-PLLH-Z (SEQ ID NO: 5045), X-KKKLTIDRY*L-C(Sx)-IVHAV-Z (SEQ ID NO: 5046), and X-KKKNHIGHTGY*L-C(Sx)-TVTVS-Z (SEQ ID NO: 5047); wherein X— is H or acetyl; and Z is OH or NH2.

[0184] In some embodiments, the metal-binding compound of the present invention is selected from the group consisting of: X-KKKQAATGFGSP-C(Sx)-QY*SAD-Z (SEQ ID NO: 5048), X-KKKRAHEEIY*F-C(Sx)-FWG-Z (SEQ ID NO: 916), X-KKKSNPALLSSP-C(Sx)-YY*SAA-Z (SEQ ID NO: 5049), X-KKKTSF[Nle][Nle][pT]PY*V-C(Sx)-TRY-Z (SEQ ID NO: 5050), X-KKSR-C(Sx)-DY*[Nle]T[Nle]QIG-Z (SEQ ID NO: 5051), X-KKTNSSEGLSMGNY*I-C(Sx)-LINR-Z (SEQ ID NO: 5052), X-KVSETDDY*A-C(Sx)-IIDEE-Z (SEQ ID NO: 5053), X-LEEEEY*I-C(Sx)-Z (SEQ ID NO: 5054), X-LEEEY*I-C(Sx)-IV-Z (SEQ ID NO: 5055), X-LHQEDNDY*I-C(Sx)-ASLIK-Z (SEQ ID NO: 969), X-LHQEDNDY*IN-C(Sx)-SLIK-Z (SEQ ID NO: 970), X-LMLRLQDY*E-C(Sx)-KTKKA-Z (SEQ ID NO: 951), X-LSRDLIMK-C(Sx)-DY*ELVSTKPTR-Z (SEQ ID NO: 5056), X-LSRDLIMKEDY*E-C(Sx)-VSTKPTR-Z (SEQ ID NO: 5057), X-LSRDLIMKEDY*E-C(Sx)-VSTK-Z (SEQ ID NO: 5058), X-LVSETDDY*A-C(Sx)-IIDEE-Z (SEQ ID NO: 5059), X-MAEEKKAY*K-C(Sx)-AKERE-Z (SEQ ID NO: 932), X-MEEEEY*I-C(Sx)-Z (SEQ ID NO: 5060), X-MEEEY*I-C(Sx)-IV-Z (SEQ ID NO: 5061), X-MK-C(Sx)-DY*ELVSTKPTRTSKVR-Z (SEQ ID NO: 5062), X-MQDNS-C(Sx)-TY*GKIWEGS-Z (SEQ ID NO: 963), X-MRHVSISY*D-C(Sx)-PPTPG-Z (SEQ ID NO: 953), X-NEEEEY*I-C(Sx)-Z (SEQ ID NO: 5063), X-NEEEY*I-C(Sx)-IV-Z (SEQ ID NO: 5064), X-NFANFSAY*P-C(Sx)-EEDMI-Z (SEQ ID NO: 949), X-NHIG-C(Sx)-TGY*LNTVTVSAKKK-Z (SEQ ID NO: 5065), X-NKVDD-C(Sx)-NY*AIKRIRL-Z (SEQ ID NO: 5066), X-NKVDDCNY*A-C(Sx)-KRIRL-Z (SEQ ID NO: 5067), X-NVSETDDY*A-C(Sx)-IIDEE-Z (SEQ ID NO: 5068), X-PAFDNLYY*W-C(Sx)-QDPPE-Z (SEQ ID NO: 990), X-PEEEEY*I-C(Sx)-Z (SEQ ID NO: 5069), X-PEEEY*I-C(Sx)-IV-Z (SEQ ID NO: 5070), X-PTAENPEY*L-C(Sx)-LDVPV-Z (SEQ ID NO: 991), X-PTGEAPTY*V-C(Sx)-TQQIP-Z (SEQ ID NO: 983), X-PVPEY*I-C(Sx)-QSV-Z (SEQ ID NO: 941), X-PVSETDDY*A-C(Sx)-IIDEE-Z (SEQ ID NO: 5071), X-QALDNPEY*H-C(Sx)-ASNGP-Z (SEQ ID NO: 992), X-QEEEEY*I-C(Sx)-Z (SEQ ID NO: 5072), X-QEEEY*I-C(Sx)-IV-Z (SEQ ID NO: 5073), X-QLAAK-C(Sx)-AY*LQILSEE-Z (SEQ ID NO: 5074), X-QLAAKLAY*L-C(Sx)-ILSEE-Z (SEQ ID NO: 5075), X-QLTFALRY*L-C(Sx)-FFTKA-Z (SEQ ID NO: 961), X-QVSETDDY*A-C(Sx)-IIDEE-Z (SEQ ID NO: 5076), X-RAEEEEY*I-C(Sx)-LVA-Z (SEQ ID NO: 909), X-RAHEEIY*F-C(Sx)-FWG-Z (SEQ ID NO: 924), X-R-C(Sx)-DY*[Nle]TMQIGKK-Z (SEQ ID NO: 5077), X-REEEEY*I-C(Sx)-Z (SEQ ID NO: 5078), X-REEEY*I-C(Sx)-IV-Z (SEQ ID NO: 5079), X-RLDGE-C(Sx)-IY*IRHSNLM-Z (SEQ ID NO: 948), X-RNEEENIY*S-C(Sx)-PHDST-Z (SEQ ID NO: 959), X-RNEGVATY*A-C(Sx)-AVLFR-Z (SEQ ID NO: 937), X-RQGSSDIY*S-C(Sx)-PEGKL-Z (SEQ ID NO: 982), X-RRAEEEEY*I-C(Sx)-LVA-Z (SEQ ID NO: 908), X-RRHY*Y-C(Sx)-DTHTNTYYLRTFGHNTRR-Z (SEQ ID NO: 5080), X-RRHYYYDTHTNTY*Y-C(Sx)-RTFGHNTRR-Z (SEQ ID NO: 5081), X-RRRAEEEEY*I-C(Sx)-LVA-Z (SEQ ID NO: 993), X-RVSETDDY*A-C(Sx)-IIDEE-Z (SEQ ID NO: 5082), X-S[Nle]SETDDY*A-C(Sx)-IIDEE-Z (SEQ ID NO: 5083), X-SASETDDY*A-C(Sx)-IIDEE-Z (SEQ ID NO: 5084), X-SDSETDDY*A-C(Sx)-IIDEE-Z (SEQ ID NO: 5085), X-SEELDENY*V-C(Sx)-MNPNS-Z (SEQ ID NO: 954), X-SEGLSM-C(Sx)-NY*IGLINRIKK-Z (SEQ ID NO: 5086), X-SESETDDY*A-C(Sx)-IIDEE-Z (SEQ ID NO: 5087), X-SFSETDDY*A-C(Sx)-IIDEE-Z (SEQ ID NO: 5088), X-SGSETDDY*A-C(Sx)-IIDEE-Z (SEQ ID NO: 5089), X-SHDSEENY*V-C(Sx)-MNPNL-Z (SEQ ID NO: 956), X-SHSETDDY*A-C(Sx)-IIDEE-Z (SEQ ID NO: 5090), X-SISETDDY*A-C(Sx)-IIDEE-Z (SEQ ID NO: 5091), X-SKSETDDY*A-C(Sx)-IIDEE-Z (SEQ ID NO: 5092), X-SLSETDDY*A-C(Sx)-IIDEE-Z (SEQ ID NO: 5093), X-SNSETDDY*A-C(Sx)-IIDEE-Z (SEQ ID NO: 5094), X-SPAFD-C(Sx)-LY*[pY]WDQDPP-Z (SEQ ID NO: 989), X-SPAFD-C(Sx)-LY*YWDQDPP-Z (SEQ ID NO: 988), and X-SPATDLY*Q-C(Sx)-PPG-Z (SEQ ID NO: 5095); wherein X is H or acetyl; and Z is OH or NH2.

[0185] In some embodiments, the metal-binding compound of the present invention is selected from the group consisting of: X-SPQPEY*V-C(Sx)-QPDVR-Z (SEQ ID NO: 987), X-SPSETDDY*A-C(Sx)-IIDEE-Z (SEQ ID NO: 5096), X-SQSETDDY*A-C(Sx)-IIDEE-Z (SEQ ID NO: 5097), X-SRSETDDY*A-C(Sx)-IIDEE-Z (SEQ ID NO: 5098), X-SSEPVGIY*Q-C(Sx)-FEKKT-Z (SEQ ID NO: 962), X-SSHKG-C(Sx)-HY*KH-Z (SEQ ID NO: 935), X-SSHKGFHY*K-C(Sx)-G-Z (SEQ ID NO: 934), X-SSTDR-C(Sx)-PY*EKVSAGN-Z (SEQ ID NO: 960), X-STAENAEY*L-C(Sx)-VAPQS-Z (SEQ ID NO: 946), X-STAEN-C(Sx)-EY*LRVAPQS-Z (SEQ ID NO: 947), X-SV[Nle]ETDDY*A-C(Sx)-IIDEE-Z (SEQ ID NO: 5099), X-SVAETDDY*A-C(Sx)-IIDEE-Z (SEQ ID NO: 5100), X-SVDETDDY*A-C(Sx)-IIDEE-Z (SEQ ID NO: 5101), X-SVEETDDY*A-C(Sx)-IIDEE-Z (SEQ ID NO: 5102), X-SVFETDDY*A-C(Sx)-IIDEE-Z (SEQ ID NO: 5103), X-SVGETDDY*A-C(Sx)-IIDEE-Z (SEQ ID NO: 5104), X-SVHETDDY*A-C(Sx)-IIDEE-Z (SEQ ID NO: 5105), X-SVIETDDY*A-C(Sx)-IIDEE-Z (SEQ ID NO: 5106), X-SVKETDDY*A-C(Sx)-IIDEE-Z (SEQ ID NO: 5107), X-SVLETDDY*A-C(Sx)-IIDEE-Z (SEQ ID NO: 5108), X-SVNETDDY*A-C(Sx)-IIDEE-Z (SEQ ID NO: 5109), X-SVPETDDY*A-C(Sx)-IIDEE-Z (SEQ ID NO: 5110), X-SVQETDDY*A-C(Sx)-IIDEE-Z (SEQ ID NO: 5111), X-SVRETDDY*A-C(Sx)-IIDEE-Z (SEQ ID NO: 5112), X-SVS[Nle]TDDY*A-C(Sx)-IIDEE-Z (SEQ ID NO: 5113), X-SVSATDDY*A-C(Sx)-IIDEE-Z (SEQ ID NO: 5114), X-SVSDTDDY*A-C(Sx)-IIDEE-Z (SEQ ID NO: 5115), X-SVSE[Nle]DDY*A-C(Sx)-IIDEE-Z (SEQ ID NO: 5116), X-SVSEADDY*A-C(Sx)-IIDEE-Z (SEQ ID NO: 5117), X-SVSEDDDY*A-C(Sx)-IIDEE-Z (SEQ ID NO: 5118), X-SVSEEDDY*A-C(Sx)-IIDEE-Z (SEQ ID NO: 5119), X-SVSEFDDY*A-C(Sx)-IIDEE-Z (SEQ ID NO: 5120), X-SVSEGDDY*A-C(Sx)-IIDEE-Z (SEQ ID NO: 5121), X-SVSEHDDY*A-C(Sx)-IIDEE-Z (SEQ ID NO: 5122), X-SVSEIDDY*A-C(Sx)-IIDEE-Z (SEQ ID NO: 5123), X-SVSEKDDY*A-C(Sx)-IIDEE-Z (SEQ ID NO: 5124), X-SVSELDDY*A-C(Sx)-IIDEE-Z (SEQ ID NO: 5125), X-SVSENDDY*A-C(Sx)-IIDEE-Z (SEQ ID NO: 5126), X-SVSEPDDY*A-C(Sx)-IIDEE-Z (SEQ ID NO: 5127), X-SVSEQDDY*A-C(Sx)-IIDEE-Z (SEQ ID NO: 5128), and X-SVSERDDY*A-C(Sx)-IIDEE-Z (SEQ ID NO: 5129); wherein X— is H or acetyl; and Z is OH or NH2.

[0186] In some embodiments, the metal-binding compound of the present invention is selected from the group consisting of: X-SVSET[Nle]DY*A-C(Sx)-IIDEE-Z (SEQ ID NO: 5130), X-SVSETADY*A-C(Sx)-IIDEE-Z (SEQ ID NO: 5131), X-SVSETD[Nle]Y*A-C(Sx)-IIDEE-Z (SEQ ID NO: 5132), X-SVSETDAY*A-C(Sx)-IIDEE-Z (SEQ ID NO: 5133), X-SVSETDDY*[Nle]-C(Sx)-IIDEE-Z (SEQ ID NO: 5134), X-SVSETDDY*A-C(Sx)-[Nle]IDEE-Z (SEQ ID NO: 5135), X-SVSETDDY*A-C(Sx)-AIDEE-Z (SEQ ID NO: 5136), X-SVSETDDY*A-C(Sx)-DIDEE-Z (SEQ ID NO: 5137), X-SVSETDDY*A-C(Sx)-EIDEE-Z (SEQ ID NO: 5138), X-SVSETDDY*A-C(Sx)-FIDEE-Z (SEQ ID NO: 5139), X-SVSETDDY*A-C(Sx)-GIDEE-Z (SEQ ID NO: 5140), X-SVSETDDY*A-C(Sx)-HIDEE-Z (SEQ ID NO: 5141), X-SVSETDDY*A-C(Sx)-I[Nle]DEE-Z (SEQ ID NO: 5142), X-SVSETDDY*A-C(Sx)-IADEE-Z (SEQ ID NO: 5143), X-SVSETDDY*A-C(Sx)-IDDEE-Z (SEQ ID NO: 5144), X-SVSETDDY*A-C(Sx)-IEDEE-Z (SEQ ID NO: 5145), X-SVSETDDY*A-C(Sx)-IFDEE-Z (SEQ ID NO: 5146), X-SVSETDDY*A-C(Sx)-IGDEE-Z (SEQ ID NO: 5147), X-SVSETDDY*A-C(Sx)-IHDEE-Z (SEQ ID NO: 5148), X-SVSETDDY*A-C(Sx)-II[Nle]EE-Z (SEQ ID NO: 5149), X-SVSETDDY*A-C(Sx)-IIAEE-Z (SEQ ID NO: 5150), X-SVSETDDY*A-C(Sx)-IID[Nle]E-Z (SEQ ID NO: 5151), X-SVSETDDY*A-C(Sx)-IIDAE-Z (SEQ ID NO: 5152), X-SVSETDDY*A-C(Sx)-IIDDE-Z (SEQ ID NO: 5153), X-SVSETDDY*A-C(Sx)-IIDE[Nle]-Z (SEQ ID NO: 5154), X-SVSETDDY*A-C(Sx)-IIDEA-Z (SEQ ID NO: 5155), X-SVSETDDY*A-C(Sx)-IIDED-Z (SEQ ID NO: 5156), X-SVSETDDY*A-C(Sx)-IIDEF-Z (SEQ ID NO: 5157), X-SVSETDDY*A-C(Sx)-IIDEG-Z (SEQ ID NO: 5158), X-SVSETDDY*A-C(Sx)-IIDEH-Z (SEQ ID NO: 5159), X-SVSETDDY*A-C(Sx)-IIDEI-Z (SEQ ID NO: 5160), X-SVSETDDY*A-C(Sx)-IIDEK-Z (SEQ ID NO: 5161), X-SVSETDDY*A-C(Sx)-IIDEL-Z (SEQ ID NO: 5162), X-SVSETDDY*A-C(Sx)-IIDEN-Z (SEQ ID NO: 5163), X-SVSETDDY*A-C(Sx)-IIDEP-Z (SEQ ID NO: 5164), X-SVSETDDY*A-C(Sx)-IIDEQ-Z (SEQ ID NO: 5165), X-SVSETDDY*A-C(Sx)-IIDER-Z (SEQ ID NO: 5166), X-SVSETDDY*A-C(Sx)-IIDEV-Z (SEQ ID NO: 5167), X-SVSETDDY*A-C(Sx)-IIDEW-Z (SEQ ID NO: 5168), X-SVSETDDY*A-C(Sx)-IIDFE-Z (SEQ ID NO: 5169), X-SVSETDDY*A-C(Sx)-IIDGE-Z (SEQ ID NO: 5170), and X-SVSETDDY*A-C(Sx)-IIDHE-Z (SEQ ID NO: 5171); wherein X is H or acetyl; and Z is OH or NH2.

[0187] In some embodiments, the metal-binding compound of the present invention is selected from the group consisting of: X-SVSETDDY*A-C(Sx)-IIDIE-Z (SEQ ID NO: 5172), X-SVSETDDY*A-C(Sx)-IIDKE-Z (SEQ ID NO: 5173), X-SVSETDDY*A-C(Sx)-IIDLE-Z (SEQ ID NO: 5174), X-SVSETDDY*A-C(Sx)-IIDNE-Z (SEQ ID NO: 5175), X-SVSETDDY*A-C(Sx)-IIDPE-Z (SEQ ID NO: 5176), X-SVSETDDY*A-C(Sx)-IIDQE-Z (SEQ ID NO: 5177), X-SVSETDDY*A-C(Sx)-IIDRE-Z (SEQ ID NO: 5178), X-SVSETDDY*A-C(Sx)-IIDVE-Z (SEQ ID NO: 5179), X-SVSETDDY*A-C(Sx)-IIDWE-Z (SEQ ID NO: 5180), X-SVSETDDY*A-C(Sx)-IIEEE-Z (SEQ ID NO: 5181), X-SVSETDDY*A-C(Sx)-IIFEE-Z (SEQ ID NO: 5182), X-SVSETDDY*A-C(Sx)-IIGEE-Z (SEQ ID NO: 5183), X-SVSETDDY*A-C(Sx)-IIHEE-Z (SEQ ID NO: 5184), X-SVSETDDY*A-C(Sx)-IIIEE-Z (SEQ ID NO: 5185), X-SVSETDDY*A-C(Sx)-IIKEE-Z (SEQ ID NO: 5186), X-SVSETDDY*A-C(Sx)-IILEE-Z (SEQ ID NO: 5187), X-SVSETDDY*A-C(Sx)-IINEE-Z (SEQ ID NO: 5188), X-SVSETDDY*A-C(Sx)-IIPEE-Z (SEQ ID NO: 5189), X-SVSETDDY*A-C(Sx)-IIQEE-Z (SEQ ID NO: 5190), X-SVSETDDY*A-C(Sx)-IIREE-Z (SEQ ID NO: 5191), X-SVSETDDY*A-C(Sx)-IIVEE-Z (SEQ ID NO: 5192), X-SVSETDDY*A-C(Sx)-IIWEE-Z (SEQ ID NO: 5193), X-SVSETDDY*A-C(Sx)-IKDEE-Z (SEQ ID NO: 5194), X-SVSETDDY*A-C(Sx)-ILDEE-Z (SEQ ID NO: 5195), X-SVSETDDY*A-C(Sx)-INDEE-Z (SEQ ID NO: 5196), X-SVSETDDY*A-C(Sx)-IPDEE-Z (SEQ ID NO: 5197), X-SVSETDDY*A-C(Sx)-IQDEE-Z (SEQ ID NO: 5198), X-SVSETDDY*A-C(Sx)-IRDEE-Z (SEQ ID NO: 5199), X-SVSETDDY*A-C(Sx)-IVDEE-Z (SEQ ID NO: 5200), X-SVSETDDY*A-C(Sx)-IWDEE-Z (SEQ ID NO: 5201), X-SVSETDDY*A-C(Sx)-KIDEE-Z (SEQ ID NO: 5202), X-SVSETDDY*A-C(Sx)-LIDEE-Z (SEQ ID NO: 5203), X-SVSETDDY*A-C(Sx)-NIDEE-Z (SEQ ID NO: 5204), X-SVSETDDY*A-C(Sx)-PIDEE-Z (SEQ ID NO: 5205), X-SVSETDDY*A-C(Sx)-QIDEE-Z (SEQ ID NO: 5206), X-SVSETDDY*A-C(Sx)-RIDEE-Z (SEQ ID NO: 5207), X-SVSETDDY*A-C(Sx)-VIDEE-Z (SEQ ID NO: 5208), X-SVSETDDY*A-C(Sx)-WIDEE-Z (SEQ ID NO: 5209), X-SVSETDDY*D-C(Sx)-IIDEE-Z (SEQ ID NO: 5210), X-SVSETDDY*E-C(Sx)-IIDEE-Z (SEQ ID NO: 5211), X-SVSETDDY*F-C(Sx)-IIDEE-Z (SEQ ID NO: 5212), X-SVSETDDY*G-C(Sx)-IIDEE-Z (SEQ ID NO: 5213), X-SVSETDDY*H-C(Sx)-IIDEE-Z (SEQ ID NO: 5214), X-SVSETDDY*I-C(Sx)-IIDEE-Z (SEQ ID NO: 5215), X-SVSETDDY*K-C(Sx)-IIDEE-Z (SEQ ID NO: 5216), X-SVSETDDY*L-C(Sx)-IIDEE-Z (SEQ ID NO: 5217), X-SVSETDDY*N-C(Sx)-IIDEE-Z (SEQ ID NO: 5218), X-SVSETDDY*P-C(Sx)-IIDEE-Z (SEQ ID NO: 5219), X-SVSETDDY*Q-C(Sx)-IIDEE-Z (SEQ ID NO: 5220), X-SVSETDDY*R-C(Sx)-IIDEE-Z (SEQ ID NO: 5221), X-SVSETDDY*V-C(Sx)-IIDEE-Z (SEQ ID NO: 5222), X-SVSETDDY*W-C(Sx)-IIDEE-Z (SEQ ID NO: 5223), X-SVSETDEY*A-C(Sx)-IIDEE-Z (SEQ ID NO: 5224), X-SVSETDFY*A-C(Sx)-IIDEE-Z (SEQ ID NO: 5225), X-SVSETDGY*A-C(Sx)-IIDEE-Z (SEQ ID NO: 5226), X-SVSETDHY*A-C(Sx)-IIDEE-Z (SEQ ID NO: 5227), X-SVSETDIY*A-C(Sx)-IIDEE-Z (SEQ ID NO: 5228), X-SVSETDKY*A-C(Sx)-IIDEE-Z (SEQ ID NO: 5229), X-SVSETDLY*A-C(Sx)-IIDEE-Z (SEQ ID NO: 5230), X-SVSETDNY*A-C(Sx)-IIDEE-Z (SEQ ID NO: 5231), X-SVSETDPY*A-C(Sx)-IIDEE-Z (SEQ ID NO: 5232), X-SVSETDQY*A-C(Sx)-IIDEE-Z (SEQ ID NO: 5233), X-SVSETDRY*A-C(Sx)-IIDEE-Z (SEQ ID NO: 5234), X-SVSETDVY*A-C(Sx)-IIDEE-Z (SEQ ID NO: 5235), and X-SVSETDWY*A-C(Sx)-IIDEE-Z (SEQ ID NO: 5236); wherein X is H or acetyl; and Z is OH or NH2.

[0188] In some embodiments, the metal-binding compound of the present invention is selected from the group consisting of: X-SVSETEDY*A-C(Sx)-IIDEE-Z (SEQ ID NO: 5237), X-SVSETFDY*A-C(Sx)-IIDEE-Z (SEQ ID NO: 5238), X-SVSETGDY*A-C(Sx)-IIDEE-Z (SEQ ID NO: 5239), X-SVSETHDY*A-C(Sx)-IIDEE-Z (SEQ ID NO: 5240), X-SVSETIDY*A-C(Sx)-IIDEE-Z (SEQ ID NO: 5241), X-SVSETKDY*A-C(Sx)-IIDEE-Z (SEQ ID NO: 5242), X-SVSETLDY*A-C(Sx)-IIDEE-Z (SEQ ID NO: 5243), X-SVSETNDY*A-C(Sx)-IIDEE-Z (SEQ ID NO: 5244), X-SVSETPDY*A-C(Sx)-IIDEE-Z (SEQ ID NO: 5245), X-SVSETQDY*A-C(Sx)-IIDEE-Z (SEQ ID NO: 5246), X-SVSETRDY*A-C(Sx)-IIDEE-Z (SEQ ID NO: 5247), X-SVSETVDY*A-C(Sx)-IIDEE-Z (SEQ ID NO: 5248), X-SVSETWDY*A-C(Sx)-IIDEE-Z (SEQ ID NO: 5249), X-SVSEVDDY*A-C(Sx)-IIDEE-Z (SEQ ID NO: 5250), X-SVSEWDDY*A-C(Sx)-IIDEE-Z (SEQ ID NO: 5251), X-SVSFTDDY*A-C(Sx)-IIDEE-Z (SEQ ID NO: 5252), X-SVSGTDDY*A-C(Sx)-IIDEE-Z (SEQ ID NO: 5253), X-SVSHTDDY*A-C(Sx)-IIDEE-Z (SEQ ID NO: 5254), X-SVSITDDY*A-C(Sx)-IIDEE-Z (SEQ ID NO: 5255), X-SVSKTDDY*A-C(Sx)-IIDEE-Z (SEQ ID NO: 5256), X-SVSLTDDY*A-C(Sx)-IIDEE-Z (SEQ ID NO: 5257), X-SVSNTDDY*A-C(Sx)-IIDEE-Z (SEQ ID NO: 5258), X-SVSPTDDY*A-C(Sx)-IIDEE-Z (SEQ ID NO: 5259), X-SVSQTDDY*A-C(Sx)-IIDEE-Z (SEQ ID NO: 5260), X-SVSRTDDY*A-C(Sx)-IIDEE-Z (SEQ ID NO: 5261), X-SVSVTDDY*A-C(Sx)-IIDEE-Z (SEQ ID NO: 5262), X-SVSWTDDY*A-C(Sx)-IIDEE-Z (SEQ ID NO: 5263), X-SVVETDDY*A-C(Sx)-IIDEE-Z (SEQ ID NO: 5264), X-SVWETDDY*A-C(Sx)-IIDEE-Z (SEQ ID NO: 5265), X-SWSETDDY*A-C(Sx)-IIDEE-Z (SEQ ID NO: 5266), X-TDGEDADY*T-C(Sx)-FTNQQ-Z (SEQ ID NO: 933), X-TDVE-C(Sx)-TY*ADFIASG-Z (SEQ ID NO: 964), X-TEADGELY*V-C(Sx)-NTPSG-Z (SEQ ID NO: 952), X-TEERLPSS*P-C(Sx)-YEDAA-Z (SEQ ID NO: 1034), X-TENDDDVY*R-C(Sx)-LEELA-Z (SEQ ID NO: 984), X-TFLPV-C(Sx)-EY*INQSVPK-Z (SEQ ID NO: 943), X-TFLPVPEY*I-C(Sx)-QSVPK-Z (SEQ ID NO: 942), X-TG[Nle]FPRNY*V-C(Sx)-PVNRN-Z (SEQ ID NO: 5267), X-TLMEKDSY*P-C(Sx)-FLKSP-Z (SEQ ID NO: 972), X-TPENN-C(Sx)-EY*AKVSGV-Z (SEQ ID NO: 5268), X-TQEQYELY*S-C(Sx)-MGSTF-Z (SEQ ID NO: 931), X-TVDGKEIY*N-C(Sx)-IRRKT-Z (SEQ ID NO: 971), X-VADERVDY*V-C(Sx)-VDQQK-Z (SEQ ID NO: 958), X-VEEEEY*I-C(Sx)-Z (SEQ ID NO: 5269), X-VEEEY*I-C(Sx)-IV-Z (SEQ ID NO: 5270), X-VQPSPARSSS*Y-C(Sx)-EANE-Z (SEQ ID NO: 5271), X-VSETDDY*A-C(Sx)-IIDEEDT-Z (SEQ ID NO: 5272), X-VTRRT-C(Sx)-DY*FL-Z (SEQ ID NO: 968), X-VVSETDDY*A-C(Sx)-IIDEE-Z (SEQ ID NO: 5273), X-VY*S-C(Sx)-DY[pY]RLFNPSKKK-Z (SEQ ID NO: 5274), X-VY*S-C(Sx)-DYYRLFNPSKKK-Z (SEQ ID NO: 5275), X-VYS-C(Sx)-DY*[pY]RLFNPSKKK-Z (SEQ ID NO: 913), X-VYS-C(Sx)-DY*YRLFNPSKKK-Z (SEQ ID NO: 912), X-WEEEEY*I-C(Sx)-Z (SEQ ID NO: 5276), X-WEEEY*I-C(Sx)-IV-Z (SEQ ID NO: 5277), and X-WVSETDDY*A-C(Sx)-IIDEE-Z (SEQ ID NO: 5278); wherein X— is H or acetyl; and Z is OH or NH2.

[0189] In some embodiments, the metal-binding compound of the present invention is selected from the group consisting of: X-EPDY*I-C(Sx)-FG-Z (SEQ ID NO: 5279); X-PDY*I-C(Sx)-FG-Z (SEQ ID NO: 5280); X-KKHTDDGY*M-C(Sx)-MSPGVA-Z (SEQ ID NO: 5281); X-KKHTD-C(Sx)-GY*MPMSPGVA-Z (SEQ ID NO: 5282); X-KKHT-C(Sx)-DGY*MPMSPGVA-Z (SEQ ID NO: 5283); X-KKHTDDGY*[Nle]-C(Sx)-[Nle]SPGVA-Z (SEQ ID NO: 5284); X-KKHTD-C(Sx)-GY*[Nle]P[Nle]SPGVA-Z (SEQ ID NO: 5285); X-KKHT-C(Sx)-DGY*[Nle]P[Nle]SPGVA-Z (SEQ ID NO: 5286); X-KKAEEEEY*I-C(Sx)-LV-Z (SEQ ID NO: 5287); X-RRRAEEEEY*I-C(Sx)-LV-Z (SEQ ID NO: 5288); X-RRAEEEEY*I-C(Sx)-LV-Z (SEQ ID NO: 5289); X-[Nle]-C(Sx)-DY*[Nle]TMQIGKK-Z (SEQ ID NO: 5290); X-A-C(Sx)-DY*[Nle]TMQIGKK-Z (SEQ ID NO: 5291); X-D-C(Sx)-DY*[Nle]TMQIGKK-Z (SEQ ID NO: 5292); X-E-C(Sx)-DY*[Nle]TMQIGKK-Z (SEQ ID NO: 5293); X-F-C(Sx)-DY*[Nle]TMQIGKK-Z (SEQ ID NO: 5294); X-G-C(Sx)-DY*[Nle]TMQIGKK-Z (SEQ ID NO: 5295); X-H-C(Sx)-DY*[Nle]TMQIGKK-Z (SEQ ID NO: 5296); X-I-C(Sx)-DY*[Nle]TMQIGKK-Z (SEQ ID NO: 5297); X-K-C(Sx)-DY*[Nle]TMQIGKK-Z (SEQ ID NO: 5298); X-L-C(Sx)-DY*[Nle]TMQIGKK-Z (SEQ ID NO: 5299); X-N-C(Sx)-DY*[Nle]TMQIGKK-Z (SEQ ID NO: 5300); X-P-C(Sx)-DY*[Nle]TMQIGKK-Z (SEQ ID NO: 5301); X-Q-C(Sx)-DY*[Nle]TMQIGKK-Z (SEQ ID NO: 5302); X-R-C(Sx)-[Nle]Y*[Nle]TMQIGKK-Z (SEQ ID NO: 5303); X-R-C(Sx)-AY*[Nle]TMQIGKK-Z (SEQ ID NO: 5304); X-R-C(Sx)-DY*[Nle][Nle]MQIGKK-Z (SEQ ID NO: 5305); X-R-C(Sx)-DY*[Nle]AMQIGKK-Z (SEQ ID NO: 5306); X-R-C(Sx)-DY*[Nle]DMQIGKK-Z (SEQ ID NO: 5307); X-R-C(Sx)-DY*[Nle]EMQIGKK-Z (SEQ ID NO: 5308); X-R-C(Sx)-DY*[Nle]FMQIGKK-Z (SEQ ID NO: 5309); X-R-C(Sx)-DY*[Nle]GMQIGKK-Z (SEQ ID NO: 5310); X-R-C(Sx)-DY*[Nle]HMQIGKK-Z (SEQ ID NO: 5311); X-R-C(Sx)-DY*[Nle]IMQIGKK-Z (SEQ ID NO: 5312); X-R-C(Sx)-DY*[Nle]KMQIGKK-Z (SEQ ID NO: 5313); X-R-C(Sx)-DY*[Nle]LMQIGKK-Z (SEQ ID NO: 5314); X-R-C(Sx)-DY*[Nle]NMQIGKK-Z (SEQ ID NO: 5315); X-R-C(Sx)-DY*[Nle]PMQIGKK-Z (SEQ ID NO: 5316); X-R-C(Sx)-DY*[Nle]QMQIGKK-Z (SEQ ID NO: 5317); X-R-C(Sx)-DY*[Nle]RMQIGKK-Z (SEQ ID NO: 5318); wherein X— is H or acetyl; and Z is OH or NH2.

[0190] In some embodiments, the metal-binding compound of the present invention is selected from the group consisting of: X-R-C(Sx)-DY*[Nle]T[Nle]QIGKK-Z (SEQ ID NO: 5319); X-R-C(Sx)-DY*[Nle]TAQIGKK-Z (SEQ ID NO: 5320); X-R-C(Sx)-DY*[Nle]TDQIGKK-Z (SEQ ID NO: 5321); X-R-C(Sx)-DY*[Nle]TEQIGKK-Z (SEQ ID NO: 5322); X-R-C(Sx)-DY*[Nle]TFQIGKK-Z (SEQ ID NO: 5323); X-R-C(Sx)-DY*[Nle]TGQIGKK-Z (SEQ ID NO: 5324); X-R-C(Sx)-DY*[Nle]THQIGKK-Z (SEQ ID NO: 5325); X-R-C(Sx)-DY*[Nle]TIQIGKK-Z (SEQ ID NO: 5326); X-R-C(Sx)-DY*[Nle]TKQIGKK-Z (SEQ ID NO: 5327); X-R-C(Sx)-DY*[Nle]TLQIGKK-Z (SEQ ID NO: 5328); X-R-C(Sx)-DY*[Nle]TM[Nle]IGKK-Z (SEQ ID NO: 5329); X-R-C(Sx)-DY*[Nle]TMAIGKK-Z (SEQ ID NO: 5330); X-R-C(Sx)-DY*[Nle]TMDIGKK-Z (SEQ ID NO: 5331); X-R-C(Sx)-DY*[Nle]TMEIGKK-Z (SEQ ID NO: 5332); X-R-C(Sx)-DY*[Nle]TMFIGKK-Z (SEQ ID NO: 5333); X-R-C(Sx)-DY*[Nle]TMGIGKK-Z (SEQ ID NO: 5334); X-R-C(Sx)-DY*[Nle]TMHIGKK-Z (SEQ ID NO: 5335); X-R-C(Sx)-DY*[Nle]TMIIGKK-Z (SEQ ID NO: 5336); X-R-C(Sx)-DY*[Nle]TMKIGKK-Z (SEQ ID NO: 5337); X-R-C(Sx)-DY*[Nle]TMLIGKK-Z (SEQ ID NO: 5338); X-R-C(Sx)-DY*[Nle]TMNIGKK-Z (SEQ ID NO: 5339); X-R-C(Sx)-DY*[Nle]TMPIGKK-Z (SEQ ID NO: 5340); X-R-C(Sx)-DY*[Nle]TMQ[Nle]GKK-Z (SEQ ID NO: 5341); X-R-C(Sx)-DY*[Nle]TMQAGKK-Z (SEQ ID NO: 5342); X-R-C(Sx)-DY*[Nle]TMQDGKK-Z (SEQ ID NO: 5343); X-R-C(Sx)-DY*[Nle]TMQEGKK-Z (SEQ ID NO: 5344); X-R-C(Sx)-DY*[Nle]TMQFGKK-Z (SEQ ID NO: 5345); X-R-C(Sx)-DY*[Nle]TMQGGKK-Z (SEQ ID NO: 5346); X-R-C(Sx)-DY*[Nle]TMQHGKK-Z (SEQ ID NO: 5347); X-R-C(Sx)-DY*[Nle]TMQI[Nle]KK-Z (SEQ ID NO: 5348); X-R-C(Sx)-DY*[Nle]TMQIAKK-Z (SEQ ID NO: 5349); X-R-C(Sx)-DY*[Nle]TMQIDKK-Z (SEQ ID NO: 5350); X-R-C(Sx)-DY*[Nle]TMQIEKK-Z (SEQ ID NO: 5351); X-R-C(Sx)-DY*[Nle]TMQIFKK-Z (SEQ ID NO: 5352); X-R-C(Sx)-DY*[Nle]TMQIG[Nle]K-Z (SEQ ID NO: 5353); X-R-C(Sx)-DY*[Nle]TMQIGAK-Z (SEQ ID NO: 5354); wherein X— is H or acetyl; and Z is OH or NH2.

[0191] In some embodiments, the metal-binding compound of the present invention is selected from the group consisting of: X-R-C(Sx)-DY*[Nle]TMQIGDK-Z (SEQ ID NO: 5355); X-R-C(Sx)-DY*[Nle]TMQIGEK-Z (SEQ ID NO: 5356); X-R-C(Sx)-DY*[Nle]TMQIGFK-Z (SEQ ID NO: 5357); X-R-C(Sx)-DY*[Nle]TMQIGGK-Z (SEQ ID NO: 5358); X-R-C(Sx)-DY*[Nle]TMQIGHK-Z (SEQ ID NO: 5359); X-R-C(Sx)-DY*[Nle]TMQIGIK-Z (SEQ ID NO: 5360); X-R-C(Sx)-DY*[Nle]TMQIGK[Nle]-Z (SEQ ID NO: 5361); X-R-C(Sx)-DY*[Nle]TMQIGKA-Z (SEQ ID NO: 5362); X-R-C(Sx)-DY*[Nle]TMQIGKD-Z (SEQ ID NO: 5363); X-R-C(Sx)-DY*[Nle]TMQIGKE-Z (SEQ ID NO: 5364); X-R-C(Sx)-DY*[Nle]TMQIGKF-Z (SEQ ID NO: 5365); X-R-C(Sx)-DY*[Nle]TMQIGKG-Z (SEQ ID NO: 5366); X-R-C(Sx)-DY*[Nle]TMQIGKH-Z (SEQ ID NO: 5367); X-R-C(Sx)-DY*[Nle]TMQIGKI-Z (SEQ ID NO: 5368); X-R-C(Sx)-DY*[Nle]TMQIGKL-Z (SEQ ID NO: 5369); X-R-C(Sx)-DY*[Nle]TMQIGKN-Z (SEQ ID NO: 5370); X-R-C(Sx)-DY*[Nle]TMQIGKP-Z (SEQ ID NO: 5371); X-R-C(Sx)-DY*[Nle]TMQIGKQ-Z (SEQ ID NO: 5372); X-R-C(Sx)-DY*[Nle]TMQIGKR-Z (SEQ ID NO: 5373); X-R-C(Sx)-DY*[Nle]TMQIGKV-Z (SEQ ID NO: 5374); X-R-C(Sx)-DY*[Nle]TMQIGKW-Z (SEQ ID NO: 5375); X-R-C(Sx)-DY*[Nle]TMQIGLK-Z (SEQ ID NO: 5376); X-R-C(Sx)-DY*[Nle]TMQIGNK-Z (SEQ ID NO: 5377); X-R-C(Sx)-DY*[Nle]TMQIGPK-Z (SEQ ID NO: 5378); X-R-C(Sx)-DY*[Nle]TMQIGQK-Z (SEQ ID NO: 5379); X-R-C(Sx)-DY*[Nle]TMQIGRK-Z (SEQ ID NO: 5380); X-R-C(Sx)-DY*[Nle]TMQIGVK-Z (SEQ ID NO: 5381); X-R-C(Sx)-DY*[Nle]TMQIGWK-Z (SEQ ID NO: 5382); X-R-C(Sx)-DY*[Nle]TMQIHKK-Z (SEQ ID NO: 5383); X-R-C(Sx)-DY*[Nle]TMQIIKK-Z (SEQ ID NO: 5384); X-R-C(Sx)-DY*[Nle]TMQIKKK-Z (SEQ ID NO: 5385); X-R-C(Sx)-DY*[Nle]TMQILKK-Z (SEQ ID NO: 5386); X-R-C(Sx)-DY*[Nle]TMQINKK-Z (SEQ ID NO: 5387); X-R-C(Sx)-DY*[Nle]TMQIPKK-Z (SEQ ID NO: 5388); X-R-C(Sx)-DY*[Nle]TMQIQKK-Z (SEQ ID NO: 5389); X-R-C(Sx)-DY*[Nle]TMQIRKK-Z (SEQ ID NO: 5390); X-R-C(Sx)-DY*[Nle]TMQIVKK-Z (SEQ ID NO: 5391); wherein X— is H or acetyl; and Z is OH or NH2.

[0192] In some embodiments, the metal-binding compound of the present invention is selected from the group consisting of: X-R-C(Sx)-DY*[Nle]TMQIWKK-Z (SEQ ID NO: 5392); X-R-C(Sx)-DY*[Nle]TMQKGKK-Z (SEQ ID NO: 5393); X-R-C(Sx)-DY*[Nle]TMQLGKK-Z (SEQ ID NO: 5394); X-R-C(Sx)-DY*[Nle]TMQNGKK-Z (SEQ ID NO: 5395); X-R-C(Sx)-DY*[Nle]TMQPGKK-Z (SEQ ID NO: 5396); X-R-C(Sx)-DY*[Nle]TMQQGKK-Z (SEQ ID NO: 5397); X-R-C(Sx)-DY*[Nle]TMQRGKK-Z (SEQ ID NO: 5398); X-R-C(Sx)-DY*[Nle]TMQVGKK-Z (SEQ ID NO: 5399); X-R-C(Sx)-DY*[Nle]TMQWGKK-Z (SEQ ID NO: 5400); X-R-C(Sx)-DY*[Nle]TMRIGKK-Z (SEQ ID NO: 5401); X-R-C(Sx)-DY*[Nle]TMVIGKK-Z (SEQ ID NO: 5402); X-R-C(Sx)-DY*[Nle]TMWIGKK-Z (SEQ ID NO: 5403); X-R-C(Sx)-DY*[Nle]TNQIGKK-Z (SEQ ID NO: 5404); X-R-C(Sx)-DY*[Nle]TPQIGKK-Z (SEQ ID NO: 5405); X-R-C(Sx)-DY*[Nle]TQQIGKK-Z (SEQ ID NO: 5406); X-R-C(Sx)-DY*[Nle]TRQIGKK-Z (SEQ ID NO: 5407); X-R-C(Sx)-DY*[Nle]TVQIGKK-Z (SEQ ID NO: 5408); X-R-C(Sx)-DY*[Nle]TWQIGKK-Z (SEQ ID NO: 5409); X-R-C(Sx)-DY*[Nle]VMQIGKK-Z (SEQ ID NO: 5410); X-R-C(Sx)-DY*[Nle]WMQIGKK-Z (SEQ ID NO: 5411); X-R-C(Sx)-DY*ATMQIGKK-Z (SEQ ID NO: 5412); X-R-C(Sx)-DY*DTMQIGKK-Z (SEQ ID NO: 5413); X-R-C(Sx)-DY*ETMQIGKK-Z (SEQ ID NO: 5414); X-R-C(Sx)-DY*FTMQIGKK-Z (SEQ ID NO: 5415); X-R-C(Sx)-DY*GTMQIGKK-Z (SEQ ID NO: 5416); X-R-C(Sx)-DY*HTMQIGKK-Z (SEQ ID NO: 5417); X-R-C(Sx)-DY*ITMQIGKK-Z (SEQ ID NO: 5418); X-R-C(Sx)-DY*KTMQIGKK-Z (SEQ ID NO: 5419); X-R-C(Sx)-DY*LTMQIGKK-Z (SEQ ID NO: 5420); X-R-C(Sx)-DY*NTMQIGKK-Z (SEQ ID NO: 5421); X-R-C(Sx)-DY*PTMQIGKK-Z (SEQ ID NO: 5422); X-R-C(Sx)-DY*QTMQIGKK-Z (SEQ ID NO: 5423); X-R-C(Sx)-DY*RTMQIGKK-Z (SEQ ID NO: 5424); X-R-C(Sx)-DY*VTMQIGKK-Z (SEQ ID NO: 5425); X-R-C(Sx)-DY*WTMQIGKK-Z (SEQ ID NO: 5426); X-R-C(Sx)-EY*[Nle]TMQIGKK-Z (SEQ ID NO: 5427); X-R-C(Sx)-FY*[Nle]TMQIGKK-Z (SEQ ID NO: 5428); X-R-C(Sx)-GY*[Nle]TMQIGKK-Z (SEQ ID NO: 5429); wherein X— is H or acetyl; and Z is OH or NH2.

[0193] In some embodiments, the metal-binding compound of the present invention is selected from the group consisting of: X-R-C(Sx)-HY*[Nle]TMQIGKK-Z (SEQ ID NO: 5430); X-R-C(Sx)-IY*[Nle]TMQIGKK-Z (SEQ ID NO: 5431); X-R-C(Sx)-KY*[Nle]TMQIGKK-Z (SEQ ID NO: 5432); X-R-C(Sx)-LY*[Nle]TMQIGKK-Z (SEQ ID NO: 5433); X-R-C(Sx)-NY*[Nle]TMQIGKK-Z (SEQ ID NO: 5434); X-R-C(Sx)-PY*[Nle]TMQIGKK-Z (SEQ ID NO: 5435); X-R-C(Sx)-QY*[Nle]TMQIGKK-Z (SEQ ID NO: 5436); X-R-C(Sx)-RY*[Nle]TMQIGKK-Z (SEQ ID NO: 5437); X-R-C(Sx)-VY*[Nle]TMQIGKK-Z (SEQ ID NO: 5438); X-V-C(Sx)-DY*[Nle]TMQIGKK-Z (SEQ ID NO: 5439); X-KKHTDDGYM-C(Sx)-MS*PGVA-Z (SEQ ID NO: 5440); X-KKHT*D-C(Sx)-GYMPMSPGVA-Z (SEQ ID NO: 5441); X-KKHTDDGY[Nle]-C(Sx)-[Nle]S*PGVA-Z (SEQ ID NO: 5442); X-KKHT*D-C(Sx)-GY[Nle]P[Nle]SPGVA-Z (SEQ ID NO: 5443); X-KKKKVKKRPQRAHSD-C(Sx)-FS*-Z (SEQ ID NO: 3473); X-EDFSS*I-C(Sx)-DMDFSALLSQISS (SEQ ID NO: 1720); X-GDQDYLS*L-C(Sx)-VG-Z (SEQ ID NO: 651); X-KKRAARATS*-C(Sx)-VFA-Z (SEQ ID NO: 5444); X-ARKRRRHPS*G-C(Sx)-PTA-Z (SEQ ID NO: 1299); X-ARKRRRHPS*G-C(Sx)-PT-Z (SEQ ID NO: 5445); X-ARKRRRHPS*G-C(Sx)-P-Z (SEQ ID NO: 5446); X-ARKRRRHPS*G[dP]-C(Sx)-Z (SEQ ID NO: 5447); X-ARKRRRHPS*GP-C(Sx)-Z (SEQ ID NO: 5448); X-ARKRRRHPS*G-C(Sx)-Z (SEQ ID NO: 5449); X-RRRQFS*L-C(Sx)-Z (SEQ ID NO: 5450); X-KKERLLDDRHDS*G-C(Sx)-DDMKDEE-Z (SEQ ID NO: 5451); X-KKERLLDDRHDS*G-C(Sx)-DEMKDEE-Z (SEQ ID NO: 5452); X-KKERLLDDRHDS*G-C(Sx)-DAMKDEE-Z (SEQ ID NO: 5453); X-KKERLLDDRHDDG-C(Sx)-DS*MKDEE-Z (SEQ ID NO: 5454); X-KKERLLDDRHDEG-C(Sx)-DS*MKDEE-Z (SEQ ID NO: 5455); X-KKERLLDDRHDAG-C(Sx)-DS*MKDEE-Z (SEQ ID NO: 5456); wherein X— is H or acetyl; and Z is OH or NH2.

[0194] In some embodiments, the metal-binding compound of the present invention is selected from the group consisting of: X-[Nle]KR-C(Sx)-AS*FKKFA-Z (SEQ ID NO: 5457); X-AKR-C(Sx)-AS*FKKFA-Z (SEQ ID NO: 5458); X-DKR-C(Sx)-AS*FKKFA-Z (SEQ ID NO: 5459); X-EKR-C(Sx)-AS*FKKFA-Z (SEQ ID NO: 5460); X-FKR-C(Sx)-AS*FKKFA-Z (SEQ ID NO: 5461); X-GKR-C(Sx)-AS*FKKFA-Z (SEQ ID NO: 5462); X-HKR-C(Sx)-AS*FKKFA-Z (SEQ ID NO: 5463); X-IKR-C(Sx)-AS*FKKFA-Z (SEQ ID NO: 5464); X-KKR-C(Sx)-AS*FKKFA-Z (SEQ ID NO: 5465); X-L[Nle]R-C(Sx)-AS*FKKFA-Z (SEQ ID NO: 5466); X-LAR-C(Sx)-AS*FKKFA-Z (SEQ ID NO: 5467); X-LDR-C(Sx)-AS*FKKFA-Z (SEQ ID NO: 5468); X-LER-C(Sx)-AS*FKKFA-Z (SEQ ID NO: 5469); X-LFR-C(Sx)-AS*FKKFA-Z (SEQ ID NO: 5470); X-LGR-C(Sx)-AS*FKKFA-Z (SEQ ID NO: 5471); X-LHR-C(Sx)-AS*FKKFA-Z (SEQ ID NO: 5472); X-LIR-C(Sx)-AS*FKKFA-Z (SEQ ID NO: 5473); X-LK[Nle]-C(Sx)-AS*FKKFA-Z (SEQ ID NO: 5474); X-LKA-C(Sx)-AS*FKKFA-Z (SEQ ID NO: 5475); X-LKD-C(Sx)-AS*FKKFA-Z (SEQ ID NO: 5476); X-LKE-C(Sx)-AS*FKKFA-Z (SEQ ID NO: 5477); X-LKF-C(Sx)-AS*FKKFA-Z (SEQ ID NO: 5478); X-LKG-C(Sx)-AS*FKKFA-Z (SEQ ID NO: 5479); X-LKH-C(Sx)-AS*FKKFA-Z (SEQ ID NO: 5480); X-LKI-C(Sx)-AS*FKKFA-Z (SEQ ID NO: 5481); X-LKK-C(Sx)-AS*FKKFA-Z (SEQ ID NO: 5482); X-LKL-C(Sx)-AS*FKKFA-Z (SEQ ID NO: 5483); X-LKN-C(Sx)-AS*FKKFA-Z (SEQ ID NO: 5484); X-LKP-C(Sx)-AS*FKKFA-Z (SEQ ID NO: 5485); X-LKQ-C(Sx)-AS*FKKFA-Z (SEQ ID NO: 5486); wherein X— is H or acetyl; and Z is OH or NH2.

[0195] In some embodiments, the metal-binding compound of the present invention is selected from the group consisting of: X-LKR-C(Sx)-[Nle]S*FKKFA-Z (SEQ ID NO: 5487); X-LKR-C(Sx)-AS*[Nle]KKFA-Z (SEQ ID NO: 5488); X-LKR-C(Sx)-AS*AKKFA-Z (SEQ ID NO: 5489); X-LKR-C(Sx)-AS*DKKFA-Z (SEQ ID NO: 5490); X-LKR-C(Sx)-AS*EKKFA-Z (SEQ ID NO: 5491); X-LKR-C(Sx)-AS*F[Nle]KFA-Z (SEQ ID NO: 5492); X-LKR-C(Sx)-AS*FAKFA-Z (SEQ ID NO: 5493); X-LKR-C(Sx)-AS*FDKFA-Z (SEQ ID NO: 5494); X-LKR-C(Sx)-AS*FEKFA-Z (SEQ ID NO: 5495); X-LKR-C(Sx)-AS*FFKFA-Z (SEQ ID NO: 5496); X-LKR-C(Sx)-AS*FGKFA-Z (SEQ ID NO: 5497); X-LKR-C(Sx)-AS*FHKFA-Z (SEQ ID NO: 5498); X-LKR-C(Sx)-AS*FIKFA-Z (SEQ ID NO: 5499); X-LKR-C(Sx)-AS*FK[Nle]FA-Z (SEQ ID NO: 5500); X-LKR-C(Sx)-AS*FKAFA-Z (SEQ ID NO: 5501); X-LKR-C(Sx)-AS*FKDFA-Z (SEQ ID NO: 5502); X-LKR-C(Sx)-AS*FKEFA-Z (SEQ ID NO: 5503); X-LKR-C(Sx)-AS*FKFFA-Z (SEQ ID NO: 5504); X-LKR-C(Sx)-AS*FKGFA-Z (SEQ ID NO: 5505); X-LKR-C(Sx)-AS*FKHFA-Z (SEQ ID NO: 5506); X-LKR-C(Sx)-AS*FKIFA-Z (SEQ ID NO: 5507); X-LKR-C(Sx)-AS*FKK[Nle]A-Z (SEQ ID NO: 5508); X-LKR-C(Sx)-AS*FKKAA-Z (SEQ ID NO: 5509); X-LKR-C(Sx)-AS*FKKDA-Z (SEQ ID NO: 5510); X-LKR-C(Sx)-AS*FKKEA-Z (SEQ ID NO: 5511); X-LKR-C(Sx)-AS*FKKF[Nle]-Z (SEQ ID NO: 5512); X-LKR-C(Sx)-AS*FKKFD-Z (SEQ ID NO: 5513); X-LKR-C(Sx)-AS*FKKFE-Z (SEQ ID NO: 5514); X-LKR-C(Sx)-AS*FKKFF-Z (SEQ ID NO: 5515); X-LKR-C(Sx)-AS*FKKFG-Z (SEQ ID NO: 5516); X-LKR-C(Sx)-AS*FKKFH-Z (SEQ ID NO: 5517); X-LKR-C(Sx)-AS*FKKFI-Z (SEQ ID NO: 5518); X-LKR-C(Sx)-AS*FKKFK-Z (SEQ ID NO: 5519); X-LKR-C(Sx)-AS*FKKFL-Z (SEQ ID NO: 5520); X-LKR-C(Sx)-AS*FKKFN-Z (SEQ ID NO: 5521); X-LKR-C(Sx)-AS*FKKFP-Z (SEQ ID NO: 5522); X-LKR-C(Sx)-AS*FKKFQ-Z (SEQ ID NO: 5523); X-LKR-C(Sx)-AS*FKKFR-Z (SEQ ID NO: 5524); X-LKR-C(Sx)-AS*FKKFV-Z (SEQ ID NO: 5525); wherein X— is H or acetyl; and Z is OH or NH2.

[0196] In some embodiments, the metal-binding compound of the present invention is selected from the group consisting of: X-LKR-C(Sx)-AS*FKKFW-Z (SEQ ID NO: 5526); X-LKR-C(Sx)-AS*FKKGA-Z (SEQ ID NO: 5527); X-LKR-C(Sx)-AS*FKKHA-Z (SEQ ID NO: 5528); X-LKR-C(Sx)-AS*FKKIA-Z (SEQ ID NO: 5529); X-LKR-C(Sx)-AS*FKKKA-Z (SEQ ID NO: 5530); X-LKR-C(Sx)-AS*FKKLA-Z (SEQ ID NO: 5531); X-LKR-C(Sx)-AS*FKKNA-Z (SEQ ID NO: 5532); X-LKR-C(Sx)-AS*FKKPA-Z (SEQ ID NO: 5533); X-LKR-C(Sx)-AS*FKKQA-Z (SEQ ID NO: 5534); X-LKR-C(Sx)-AS*FKKRA-Z (SEQ ID NO: 5535); X-LKR-C(Sx)-AS*FKKVA-Z (SEQ ID NO: 5536); X-LKR-C(Sx)-AS*FKKWA-Z (SEQ ID NO: 5537); X-LKR-C(Sx)-AS*FKLFA-Z (SEQ ID NO: 5538); X-LKR-C(Sx)-AS*FKNFA-Z (SEQ ID NO: 5539); X-LKR-C(Sx)-AS*FKPFA-Z (SEQ ID NO: 5540); X-LKR-C(Sx)-AS*FKQFA-Z (SEQ ID NO: 5541); X-LKR-C(Sx)-AS*FKRFA-Z (SEQ ID NO: 5542); X-LKR-C(Sx)-AS*FKVFA-Z (SEQ ID NO: 5543); X-LKR-C(Sx)-AS*FKWFA-Z (SEQ ID NO: 5544); X-LKR-C(Sx)-AS*FLKFA-Z (SEQ ID NO: 5545); X-LKR-C(Sx)-AS*FNKFA-Z (SEQ ID NO: 5546); X-LKR-C(Sx)-AS*FPKFA-Z (SEQ ID NO: 5547); X-LKR-C(Sx)-AS*FQKFA-Z (SEQ ID NO: 5548); X-LKR-C(Sx)-AS*FRKFA-Z (SEQ ID NO: 5549); X-LKR-C(Sx)-AS*FVKFA-Z (SEQ ID NO: 5550); X-LKR-C(Sx)-AS*FWKFA-Z (SEQ ID NO: 5551); X-LKR-C(Sx)-AS*GKKFA-Z (SEQ ID NO: 5552); X-LKR-C(Sx)-AS*HKKFA-Z (SEQ ID NO: 5553); X-LKR-C(Sx)-AS*IKKFA-Z (SEQ ID NO: 5554); X-LKR-C(Sx)-AS*KKKFA-Z (SEQ ID NO: 5555); X-LKR-C(Sx)-AS*LKKFA-Z (SEQ ID NO: 5556); X-LKR-C(Sx)-AS*NKKFA-Z (SEQ ID NO: 5557); X-LKR-C(Sx)-AS*PKKFA-Z (SEQ ID NO: 5558); X-LKR-C(Sx)-AS*QKKFA-Z (SEQ ID NO: 5559); X-LKR-C(Sx)-AS*RKKFA-Z (SEQ ID NO: 5560); X-LKR-C(Sx)-AS*VKKFA-Z (SEQ ID NO: 5561); X-LKR-C(Sx)-AS*WKKFA-Z (SEQ ID NO: 5562); X-LKR-C(Sx)-DS*FKKFA-Z (SEQ ID NO: 5563); X-LKR-C(Sx)-ES*FKKFA-Z (SEQ ID NO: 5564); X-LKR-C(Sx)-FS*FKKFA-Z (SEQ ID NO: 5565); X-LKR-C(Sx)-GS*FKKFA-Z (SEQ ID NO: 5566); wherein X— is H or acetyl; and Z is OH or NH2.

[0197] In some embodiments, the metal-binding compound of the present invention is selected from the group consisting of: X-LKR-C(Sx)-HS*FKKFA-Z (SEQ ID NO: 5567); X-LKR-C(Sx)-IS*FKKFA-Z (SEQ ID NO: 5568); X-LKR-C(Sx)-KS*FKKFA-Z (SEQ ID NO: 5569); X-LKR-C(Sx)-LS*FKKFA-Z (SEQ ID NO: 5570); X-LKR-C(Sx)-NS*FKKFA-Z (SEQ ID NO: 5571); X-LKR-C(Sx)-PS*FKKFA-Z (SEQ ID NO: 5572); X-LKR-C(Sx)-QS*FKKFA-Z (SEQ ID NO: 5573); X-LKR-C(Sx)-RS*FKKFA-Z (SEQ ID NO: 5574); X-LKR-C(Sx)-VS*FKKFA-Z (SEQ ID NO: 5575); X-LKR-C(Sx)-WS*FKKFA-Z (SEQ ID NO: 5576); X-LKV-C(Sx)-AS*FKKFA-Z (SEQ ID NO: 5577); X-LKW-C(Sx)-AS*FKKFA-Z (SEQ ID NO: 5578); X-LLR-C(Sx)-AS*FKKFA-Z (SEQ ID NO: 5579); X-LNR-C(Sx)-AS*FKKFA-Z (SEQ ID NO: 5580); X-LPR-C(Sx)-AS*FKKFA-Z (SEQ ID NO: 5581); X-LQR-C(Sx)-AS*FKKFA-Z (SEQ ID NO: 5582); X-LRR-C(Sx)-AS*FKKFA-Z (SEQ ID NO: 5583); X-LVR-C(Sx)-AS*FKKFA-Z (SEQ ID NO: 5584); X-LWR-C(Sx)-AS*FKKFA-Z (SEQ ID NO: 5585); X-NKR-C(Sx)-AS*FKKFA-Z (SEQ ID NO: 5586); X-PKR-C(Sx)-AS*FKKFA-Z (SEQ ID NO: 5587); X-QKR-C(Sx)-AS*FKKFA-Z (SEQ ID NO: 5588); X-RKR-C(Sx)-AS*FKKFA-Z (SEQ ID NO: 5589); X-VKR-C(Sx)-AS*FKKFA-Z (SEQ ID NO: 5590); X-WKR-C(Sx)-AS*FKKFA-Z (SEQ ID NO: 5591); X-C(Sx)-PGS*FRR-Z (SEQ ID NO: 5592); X-C(Sx)-AS*FRR-Z (SEQ ID NO: 5593); X-C(Sx)-[Nle]GS*FRRR-Z (SEQ ID NO: 5594); X-C(Sx)-AGS*FRRR-Z (SEQ ID NO: 5595); X-C(Sx)-DGS*FRRR-Z (SEQ ID NO: 5596); X-C(Sx)-EGS*FRRR-Z (SEQ ID NO: 5597); X-C(Sx)-FGS*FRRR-Z (SEQ ID NO: 5598); X-C(Sx)-GGS*FRRR-Z (SEQ ID NO: 5599); X-C(Sx)-HGS*FRRR-Z (SEQ ID NO: 5600); wherein X— is H or acetyl; and Z is OH or NH2.

[0198] In some embodiments, the metal-binding compound of the present invention is selected from the group consisting of: X-C(Sx)-IGS*FRRR-Z (SEQ ID NO: 5601); X-C(Sx)-KGS*FRRR-Z (SEQ ID NO: 5602); X-C(Sx)-LGS*FRRR-Z (SEQ ID NO: 5603); X-C(Sx)-NGS*FRRR-Z (SEQ ID NO: 5604); X-C(Sx)-P[Nle]S*FRRR-Z (SEQ ID NO: 5605); X-C(Sx)-PAS*FRRR-Z (SEQ ID NO: 5606); X-C(Sx)-PDS*FRRR-Z (SEQ ID NO: 5607); X-C(Sx)-PES*FRRR-Z (SEQ ID NO: 5608); X-C(Sx)-PFS*FRRR-Z (SEQ ID NO: 5609); X-C(Sx)-PGS*[Nle]RRR-Z (SEQ ID NO: 5610); X-C(Sx)-PGS*ARRR-Z (SEQ ID NO: 5611); X-C(Sx)-PGS*DRRR-Z (SEQ ID NO: 5612); X-C(Sx)-PGS*ERRR-Z (SEQ ID NO: 5613); X-C(Sx)-PGS*F[Nle]RR-Z (SEQ ID NO: 5614); X-C(Sx)-PGS*FARR-Z (SEQ ID NO: 5615); X-C(Sx)-PGS*FDRR-Z (SEQ ID NO: 5616); X-C(Sx)-PGS*FERR-Z (SEQ ID NO: 5617); X-C(Sx)-PGS*FFRR-Z (SEQ ID NO: 5618); X-C(Sx)-PGS*FGRR-Z (SEQ ID NO: 5619); X-C(Sx)-PGS*FHRR-Z (SEQ ID NO: 5620); X-C(Sx)-PGS*FIRR-Z (SEQ ID NO: 5621); X-C(Sx)-PGS*FKRR-Z (SEQ ID NO: 5622); X-C(Sx)-PGS*FLRR-Z (SEQ ID NO: 5623); X-C(Sx)-PGS*FNRR-Z (SEQ ID NO: 5624); X-C(Sx)-PGS*FPRR-Z (SEQ ID NO: 5625); X-C(Sx)-PGS*FQRR-Z (SEQ ID NO: 5626); X-C(Sx)-PGS*FR[Nle]R-Z (SEQ ID NO: 5627); X-C(Sx)-PGS*FRAR-Z (SEQ ID NO: 5628); X-C(Sx)-PGS*FRDR-Z (SEQ ID NO: 5629); X-C(Sx)-PGS*FRER-Z (SEQ ID NO: 5630); X-C(Sx)-PGS*FRFR-Z (SEQ ID NO: 5631); X-C(Sx)-PGS*FRGR-Z (SEQ ID NO: 5632); X-C(Sx)-PGS*FRHR-Z (SEQ ID NO: 5633); X-C(Sx)-PGS*FRIR-Z (SEQ ID NO: 5634); X-C(Sx)-PGS*FRKR-Z (SEQ ID NO: 5635); X-C(Sx)-PGS*FRLR-Z (SEQ ID NO: 5636); wherein X— is H or acetyl; and Z is OH or NH2.

[0199] In some embodiments, the metal-binding compound of the present invention is selected from the group consisting of: X-C(Sx)-PGS*FRNR-Z (SEQ ID NO: 5637); X-C(Sx)-PGS*FRPR-Z (SEQ ID NO: 5638); X-C(Sx)-PGS*FRQR-Z (SEQ ID NO: 5639); X-C(Sx)-PGS*FRR[Nle]-Z (SEQ ID NO: 5640); X-C(Sx)-PGS*FRRA-Z (SEQ ID NO: 5641); X-C(Sx)-PGS*FRRD-Z (SEQ ID NO: 5642); X-C(Sx)-PGS*FRRE-Z (SEQ ID NO: 5643); X-C(Sx)-PGS*FRRF-Z (SEQ ID NO: 5644); X-C(Sx)-PGS*FRRG-Z (SEQ ID NO: 5645); X-C(Sx)-PGS*FRRH-Z (SEQ ID NO: 5646); X-C(Sx)-PGS*FRRI-Z (SEQ ID NO: 5647); X-C(Sx)-PGS*FRRK-Z (SEQ ID NO: 5648); X-C(Sx)-PGS*FRRL-Z (SEQ ID NO: 5649); X-C(Sx)-PGS*FRRN-Z (SEQ ID NO: 5650); X-C(Sx)-PGS*FRRP-Z (SEQ ID NO: 5651); X-C(Sx)-PGS*FRRQ-Z (SEQ ID NO: 5652); X-C(Sx)-PGS*FRRR-Z (SEQ ID NO: 5653); X-C(Sx)-PGS*FRRV-Z (SEQ ID NO: 5654); X-C(Sx)-PGS*FRRW-Z (SEQ ID NO: 5655); X-C(Sx)-PGS*FRVR-Z (SEQ ID NO: 5656); X-C(Sx)-PGS*FRWR-Z (SEQ ID NO: 5657); X-C(Sx)-PGS*FVRR-Z (SEQ ID NO: 5658); X-C(Sx)-PGS*FWRR-Z (SEQ ID NO: 5659); X-C(Sx)-PGS*GRRR-Z (SEQ ID NO: 5660); X-C(Sx)-PGS*HRRR-Z (SEQ ID NO: 5661); X-C(Sx)-PGS*IRRR-Z (SEQ ID NO: 5662); X-C(Sx)-PGS*KRRR-Z (SEQ ID NO: 5663); X-C(Sx)-PGS*LRRR-Z (SEQ ID NO: 5664); X-C(Sx)-PGS*NRRR-Z (SEQ ID NO: 5665); X-C(Sx)-PGS*PRRR-Z (SEQ ID NO: 5666); X-C(Sx)-PGS*QRRR-Z (SEQ ID NO: 5667); X-C(Sx)-PGS*RRRR-Z (SEQ ID NO: 5668); X-C(Sx)-PGS*VRRR-Z (SEQ ID NO: 5669); X-C(Sx)-PGS*WRRR-Z (SEQ ID NO: 5670); X-C(Sx)-PHS*FRRR-Z (SEQ ID NO: 5671); X-C(Sx)-PIS*FRRR-Z (SEQ ID NO: 5672); X-C(Sx)-PKS*FRRR-Z (SEQ ID NO: 5673); X-C(Sx)-PLS*FRRR-Z (SEQ ID NO: 5674); X-C(Sx)-PNS*FRRR-Z (SEQ ID NO: 5675); wherein X— is H or acetyl; and Z is OH or NH2.

[0200] In some embodiments, the metal-binding compound of the present invention is selected from the group consisting of: X-C(Sx)-PPS*FRRR-Z (SEQ ID NO: 5676); X-C(Sx)-PQS*FRRR-Z (SEQ ID NO: 5677); X-C(Sx)-PRS*FRRR-Z (SEQ ID NO: 5678); X-C(Sx)-PVS*FRRR-Z (SEQ ID NO: 5679); X-C(Sx)-QGS*FRRR-Z (SEQ ID NO: 5680); X-C(Sx)-RGS*FRRR-Z (SEQ ID NO: 5681); X-C(Sx)-VGS*FRRR-Z (SEQ ID NO: 5682); X-C(Sx)-[Nle]S*FRRR-Z (SEQ ID NO: 5683); X-C(Sx)-AS*FRRR-Z (SEQ ID NO: 5684); X-C(Sx)-DS*FRRR-Z (SEQ ID NO: 5685); X-C(Sx)-ES*FRRR-Z (SEQ ID NO: 5686); X-C(Sx)-FS*FRRR-Z (SEQ ID NO: 5687); X-C(Sx)-GS*[Nle]RRR-Z (SEQ ID NO: 5688); X-C(Sx)-GS*ARRR-Z (SEQ ID NO: 5689); X-C(Sx)-GS*DRRR-Z (SEQ ID NO: 5690); X-C(Sx)-GS*ERRR-Z (SEQ ID NO: 5691); X-C(Sx)-GS*F[Nle]RR-Z (SEQ ID NO: 5692); X-C(Sx)-GS*FARR-Z (SEQ ID NO: 5693); X-C(Sx)-GS*FDRR-Z (SEQ ID NO: 5694); X-C(Sx)-GS*FERR-Z (SEQ ID NO: 5695); X-C(Sx)-GS*FFRR-Z (SEQ ID NO: 5696); X-C(Sx)-GS*FGRR-Z (SEQ ID NO: 5697); X-C(Sx)-GS*FHRR-Z (SEQ ID NO: 5698); X-C(Sx)-GS*FIRR-Z (SEQ ID NO: 5699); X-C(Sx)-GS*FKRR-Z (SEQ ID NO: 5700); X-C(Sx)-GS*FLRR-Z (SEQ ID NO: 5701); X-C(Sx)-GS*FNRR-Z (SEQ ID NO: 5702); X-C(Sx)-GS*FPRR-Z (SEQ ID NO: 5703); X-C(Sx)-GS*FQRR-Z (SEQ ID NO: 5704); X-C(Sx)-GS*FR[Nle]R-Z (SEQ ID NO: 5705); X-C(Sx)-GS*FRAR-Z (SEQ ID NO: 5706); X-C(Sx)-GS*FRDR-Z (SEQ ID NO: 5707); X-C(Sx)-GS*FRER-Z (SEQ ID NO: 5708); X-C(Sx)-GS*FRFR-Z (SEQ ID NO: 5709); wherein X— is H or acetyl; and Z is OH or NH2.

[0201] In some embodiments, the metal-binding compound of the present invention is selected from the group consisting of: X-C(Sx)-GS*FRGR-Z (SEQ ID NO: 5710); X-C(Sx)-GS*FRHR-Z (SEQ ID NO: 5711); X-C(Sx)-GS*FRIR-Z (SEQ ID NO: 5712); X-C(Sx)-GS*FRKR-Z (SEQ ID NO: 5713); X-C(Sx)-GS*FRLR-Z (SEQ ID NO: 5714); X-C(Sx)-GS*FRNR-Z (SEQ ID NO: 5715); X-C(Sx)-GS*FRPR-Z (SEQ ID NO: 5716); X-C(Sx)-GS*FRQR-Z (SEQ ID NO: 5717); X-C(Sx)-GS*FRR[Nle]-Z (SEQ ID NO: 5718); X-C(Sx)-GS*FRRA-Z (SEQ ID NO: 5719); X-C(Sx)-GS*FRRD-Z (SEQ ID NO: 5720); X-C(Sx)-GS*FRRE-Z (SEQ ID NO: 5721); X-C(Sx)-GS*FRRF-Z (SEQ ID NO: 5722); X-C(Sx)-GS*FRRG-Z (SEQ ID NO: 5723); X-C(Sx)-GS*FRRH-Z (SEQ ID NO: 5724); X-C(Sx)-GS*FRRI-Z (SEQ ID NO: 5725); X-C(Sx)-GS*FRRK-Z (SEQ ID NO: 5726); X-C(Sx)-GS*FRRL-Z (SEQ ID NO: 5727); X-C(Sx)-GS*FRRN-Z (SEQ ID NO: 5728); X-C(Sx)-GS*FRRP-Z (SEQ ID NO: 5729); X-C(Sx)-GS*FRRQ-Z (SEQ ID NO: 5730); X-C(Sx)-GS*FRRR-Z (SEQ ID NO: 5731); X-C(Sx)-GS*FRRV-Z (SEQ ID NO: 5732); X-C(Sx)-GS*FRRW-Z (SEQ ID NO: 5733); X-C(Sx)-GS*FRVR-Z (SEQ ID NO: 5734); X-C(Sx)-GS*FRWR-Z (SEQ ID NO: 5735); X-C(Sx)-GS*FVRR-Z (SEQ ID NO: 5736); X-C(Sx)-GS*FWRR-Z (SEQ ID NO: 5737); X-C(Sx)-GS*GRRR-Z (SEQ ID NO: 5738); X-C(Sx)-GS*HRRR-Z (SEQ ID NO: 5739); X-C(Sx)-GS*IRRR-Z (SEQ ID NO: 5740); X-C(Sx)-GS*KRRR-Z (SEQ ID NO: 5741); X-C(Sx)-GS*LRRR-Z (SEQ ID NO: 5742); X-C(Sx)-GS*NRRR-Z (SEQ ID NO: 5743); X-C(Sx)-GS*PRRR-Z (SEQ ID NO: 5744); X-C(Sx)-GS*QRRR-Z (SEQ ID NO: 5745); X-C(Sx)-GS*RRRR-Z (SEQ ID NO: 5746); X-C(Sx)-GS*VRRR-Z (SEQ ID NO: 5747); X-C(Sx)-GS*WRRR-Z (SEQ ID NO: 5748); X-C(Sx)-HS*FRRR-Z (SEQ ID NO: 5749); X-C(Sx)-IS*FRRR-Z (SEQ ID NO: 5750); wherein X— is H or acetyl; and Z is OH or NH2.

[0202] In some embodiments, the metal-binding compound of the present invention is selected from the group consisting of: X-C(Sx)-KS*FRRR-Z (SEQ ID NO: 5751); X-C(Sx)-NS*FRRR-Z (SEQ ID NO: 5752); X-C(Sx)-PS*FRRR-Z (SEQ ID NO: 5753); X-C(Sx)-QS*FRRR-Z (SEQ ID NO: 5754); X-C(Sx)-RS*FRRR-Z (SEQ ID NO: 5755); X-C(Sx)-VS*FRRR-Z (SEQ ID NO: 5756); X-[Nle]-C(Sx)-GS*FRRR-Z (SEQ ID NO: 5757); X-A-C(Sx)-GS*FRRR-Z (SEQ ID NO: 5758); X-D-C(Sx)-GS*FRRR-Z (SEQ ID NO: 5759); X-E-C(Sx)-GS*FRRR-Z (SEQ ID NO: 5760); X-F-C(Sx)-GS*FRRR-Z (SEQ ID NO: 5761); X-G-C(Sx)-GS*FRRR-Z (SEQ ID NO: 5762); X-H-C(Sx)-GS*FRRR-Z (SEQ ID NO: 5763); X-I-C(Sx)-GS*FRRR-Z (SEQ ID NO: 5764); X-K-C(Sx)-GS*FRRR-Z (SEQ ID NO: 5765); X-L-C(Sx)-GS*FRRR-Z (SEQ ID NO: 5766); X-N-C(Sx)-GS*FRRR-Z (SEQ ID NO: 5767); X-Q-C(Sx)-GS*FRRR-Z (SEQ ID NO: 5768); X-R-C(Sx)-GS*FRRR-Z (SEQ ID NO: 5769); X-V-C(Sx)-GS*FRRR-Z (SEQ ID NO: 5770); X-P-C(Sx)-GS*FRRR-Z (SEQ ID NO: 5771); X-LD-C(Sx)-AS*LSLSLSSANSLYDD-Z (SEQ ID NO: 5772); X-SGDED-C(Sx)-AS*IADMDFSAL-Z (SEQ ID NO: 5773); X-SGDEDFAS*I-C(Sx)-DMDFSALLSQ-Z (SEQ ID NO: 5774); X-EDFAS*I-C(Sx)-DMDFSALLSQISS (SEQ ID NO: 5775); X-SLDSSSLAL-C(Sx)-LS*AANSLYDD-Z (SEQ ID NO: 5776); X-SLDSSSLS*L-C(Sx)-LASANSLYDD-Z (SEQ ID NO: 5777); X-DLGYAKDVDQGS*L-C(Sx)-TSFVGTLQY-Z (SEQ ID NO: 5778); X-RRKDLHDDEEDEA[Nle]S*I-C(Sx)-A-Z (SEQ ID NO: 5779); X-KKKVSGQLIDS*[Nle]-C(Sx)-NSFVGTRSY-Z (SEQ ID NO: 3646); X-KKKVSGQLIDS[Nle]-C(Sx)-NS*FVGTRSY-Z (SEQ ID NO: 3656); wherein X— is H or acetyl; and Z is OH or NH2.

[0203] In some embodiments, C(Sx) represents an amino acid of formula (I):

[chemical structure]

each R is independently hydrogen, or —SO₂X′, wherein at least one R group is —SO₂X′;

### X′ is —OR″ or —NR′R′″;

[0204] R′ is hydroxyl, amino, or thiol;
R″ is C₁₋₆ alkyl;
R′″ is hydrogen or alkyl; and
n is 1, 2 or 3.

[0205] In some embodiments, R′ is hydroxyl.

[0206] In some embodiments, at least one R is hydrogen. In some embodiments, all instances of R represent hydrogen.

[0207] In some embodiments, one and only one R is —SO₂X′.

[0208] In some embodiments, n is 1.

[0209] In some embodiments, R′ is hydroxyl and one and only one R is —SO₂X′.

[0210] In some embodiments, C(Sx) represents an amino acid of formula (II):

[chemical structure]

wherein

### X′ is —OR″ or —NR″R′″;

[0211] R″ is C₁₋₆ alkyl; and
R′″ is hydrogen or C₁₋₆ alkyl.

[0212] In some embodiments. C(Sx) represents an amino acid of formula (III):

[chemical structure]

[0213] The metal-binding compounds of the present invention undergo chelation-enhanced fluorescence (CHEF) upon binding to Mg²⁺. The fluorescence of the amino acid residues in accordance with the present invention increases by at least about 100%, when bound to Mg²⁺. In some embodiments, fluorescence of the amino acid residues increases by at least about 200%, when bound to Mg²⁺. In some embodiments, fluorescence of the amino acid residues increases by at least about 400%, when bound to Mg²⁺.

[0214] The compounds of the invention can be synthesized using peptide synthesis (solid phase or solution phase). Standard peptide synthesis is well-known in the art. See, for example, Fmoc Solid Phase Peptide Synthesis—A Practical Approach, Oxford University Press, 2003, Eds W. C. Chan and P. D. White (ISBN 0 19 963 724 5); and The Chemical Synthesis of Peptides, Clarendon Press, Oxford, 1994, Jones, J. (ISBN 0 19 855839 2).

[0215] In some embodiments, the metal binding amino acid residue (e.g., —C(Sx)-) of the chemosensors is −2 or +2 residues from the amino acid (e.g., tyrosine, serine or threonine) that is phosphorylated by the kinase. In some embodiments, the metal binding amino acid residue of the chemosensors is −3 or +3 residues from the amino acid that is phosphorylated by the kinase. Negative (−) positions indicate the compound is located on the N-terminal side of the amino acid that is phosphorylated by the kinase, while positive (+) positions indicate the compound is located on the C-terminal side of the amino acid that is phosphorylated by the kinase.

[0216] The metal binding amino acid residue comprises a fluorophore that can be used as readout when positioned appropriately within the optimized peptide substrate to create fluorescence-based kinase assays. Examples of fluorophores include, but are not limited to, 5-FAM (5-Carboxyfluorescein; Caliper EZ Reader, Perkin Elmer and IMAP from Molecular Devices), Coumarin and Fluorescein (Z-Lyte, Thermo Fisher), pyrene, perylene, borodiazaindacene (BODIPY™), cyanine dye 2, cyanine dye 3, cyanine dye 5 and Alexa dyes.

[0217] In some embodiments, the metal binding amino acid residue is an amino acid of formula I, II, or III.

[0218] In some embodiments, the metal binding amino acid residue is Sox, C-Sox, or C-Clk.

[0219] In some embodiments, the metal binding amino acid residue is C-Sox.

[0220] Phosphorylation sites in accordance with the present invention include hydroxyl-containing amino acids within kinase recognition motifs. Examples include naturally occurring hydroxyl-containing amino acid residues, such as serine, threonine, tyrosine and histidine and non-naturally occurring hydroxyl-containing amino acid residues.

[0221] The peptide sensors according to the present invention have at least one kinase recognition sequence. In some cases, the residues on one side of the side chain to be phosphorylated are more important, however, it is clear that more residues might confer additional specificity. This specificity could play an important role in any assays that assess kinases in complex media, in particular in live cells or cell lysates where all cellular enzymes have the potential to interact with the substrate peptide. Added recognition elements can target the sensor more specifically to the desired kinase in competitive assays where several different kinases or isozymes of one kinase are present. Including additional amino acid sequence or altering the order of residues in the sequence can also improve the kinetic properties of the substrate, for example resulting in lower Km, higher Vmax or kcat etc. values.

### Exemplary Synthetic Procedures

[0222] The chemosensor peptides were constructed in a variety of ways.

[0223] In the one approach, Fmoc-based solid-phase peptide synthesis (SPPS) was utilized to assemble the intact peptide that includes an appropriately placed cysteine protected with an acid-labile group. After selective on-resin sulfhydryl group deprotection with acid, the free thiol is alkylated with Sox-Br. Standard TFA cleavage from the resin and concomitant removal of all side chain protecting groups reveal the desired chemosensor with excellent conversion to the alkylated product (>95%). The solid support-based alkylation is particularly valuable when utilizing automated SPPS or SPOT34 synthesis to generate libraries of peptides in a rapid manner.

[chemical structure]

[0224] In some instances, peptides were synthesized on Fmoc-PAL-PEG-PS resin (Applied Biosystems, 0.19 mmol/g) using on-resin alkylation. The resin was swelled in CH₂Cl₂ (DCM) (5 min) and then DMF (5 min) prior to synthesis. The amino acids were coupled according to the following procedure: Fmoc deprotection (20% 4-methylpiperidine in DMF, 3-5 min), rinsing step (DMF), coupling step (amino acid/PyBOP/HOBt/DIEA, 6:6:6:6, 0.15 M in DMF, 30-45 min), rinsing step (DMF, then DCM). The coupling was repeated if necessary as determined by the TNBS test. At the end of the synthesis, the Fmoc group was removed with 20% 4-methylpiperidine in DMF, and the resin was rinsed with DMF. The resin-attached free amines were capped by exposure to Ac₂O (20 equiv.) and pyridine (20 equiv.) in DMF for 30 min. The resin was rinsed with DMF and then DCM, and subjected to 20% 4-methylpiperidine in DMF. The resin was finally washed with DMF, DCM, and MeOH, and dried under vacuum.

[0225] Resin-attached peptides (50 mg, 0.0095 mmol, 1 equiv) incorporating Cys-(Mmt) (Mmt=4-methoxytrityl) were swelled in DCM and then DMF. The Mmt protecting group was removed from the resin-bound peptide by bubbling N2 through a solution of 1% TFA and 5% TIS in DCM. The resin was washed with DCM and DMF. Anhydrous DMF was added to the resin followed by freshly distilled tetramethylguanidine (0.0475 mmol, 5 equiv.). The mixture was incubated for 2-3 min. Sox-Br (3 equiv.) was dissolved in anhydrous DMF and added to the resin. After ca. 12 h of reaction time, the excess reagents were drained and the resin was washed with DMF, DCM, MeOH, and DCM.

[0226] Alternatively, a building block approach may be used to prepare a chemosensor peptide. In this case, the synthesis of the building block, Fmoc-C(Sox[TBDPS])-OH, may commence with the allylation of commercially available amino acid, followed by removal of the p-methoxytrityl (Mmt) masking group. The sulfhydryl is then alkylated with Sox-Br in excellent yield (95%). Lastly, Pd(II)-assisted deallylation produces the desired amino acid that was subsequently used in standard Fmoc-based SPPS (described above) to produce sensors in excellent yields. Peptide identities and purities were confirmed via matrix-assisted laser desorption ionization time-of-flight (MALDI TOF) or electrospray ionization mass spectrometry together with high performance liquid chromatography analysis. The synthesis of C-Sox, and therefore of chemosensor peptides, is facile since a chiral starting material is used.

[0227] Peptides were purified by preparative reversed-phase HPLC using dual wavelength detection (228 nm: amide; 360 nm: C-Sox). Peptide concentrations were then determined using UV-vis spectrophotometry based on the C-Sox-chromophore extinction coefficient of 8247M-1 cm-1 at 355 nM in 0.1 M NaOH and 1 mM EDTA.

### Assays

[0228] Fluorescence of the peptides was measured in the presence and absence of Mg²⁺. The reporter functionality is the unnatural chromophore (e.g., C-Sox) that undergoes chelation-enhanced fluorescence (CHEF) upon metal binding. The Mg²⁺ affinity of the chemosensors is low (K=100-300 mM) when the phosphate group is not present, while phosphorylation significantly increases Mg²⁺ affinity (K_{D}=0.1-20 mM). Thus, at a selected Mg²⁺ concentration, a large portion of phosphopeptide exists in the bound, fluorescent state. In the presence of saturated MgCl₂, the Sox peptides exhibit a maximum emission at 485 nm with a maximum excitation at 360 nm. In addition, these peptides maintain striking luminescence properties of the fluorophore. The extinction coefficient and quantum yield values for representative chemosensor-Mg²⁺ complexes are determined following quantitative amino acid analysis.

[0229] To solve for enzyme kinetic parameters for this reaction, determination of the initial rate of product formation from the increase in fluorescence intensity is necessary. With this sensor, a correction for the decrease in fluorescence intensity due to the starting material being consumed is needed to determine the rate of product formation from the initial slope. The fluorescence intensity at any given point can be determined from the following equation:

I(t)=f_{S}s(t)+f_{P}P(t) (1)

where I(t) is the fluorescence intensity. S(t) is the amount of substrate in μM, P(t) is the amount of product in IM, f_{S} is the fluorescence intensity per μM of substrate, and f_{P} is fluorescence intensity per μM of product. The amount of substrate and product at any given point are related by:

S(t)+P(t)=S₀ (2)

where S₀ is the initial amount of substrate. Substitution of (2) into (1) followed by rearrangement, yields:

$$P ( t ) = \frac{I ( t ) - {f}_{S} {S}_{0}}{{f}_{P} - {f}_{S}} \qquad ( 3 )$$

[0230] The initial velocity of the reaction is the change in the amount of product over time, so taking the derivative of (3) with respect to time gives:

$$v = \frac{d P ( t )}{d t} = \frac{\frac{d I ( t )}{d t}}{{f}_{P} - {f}_{S}} \qquad ( 4 )$$

[0231] The initial slope of the reaction, dI(t)/dt, was measured within the first 5% of substrate turnover. The constants f_{P} and f_{S} were calculated from the slope of a line of fluorescence intensity versus concentration of P and S, respectively. A linear fit of a Hanes plot ([S]/V vs. V) was used to find Kₘ and Vₘₐₓ.

[0232] The sensors of the present invention can be used in a method for detecting kinase activity.

[0233] In some embodiments, the method for detecting kinase activity, comprising the steps of:

[0234] a) providing a compound of the invention;

[0235] b) contacting the compound with a sample comprising Mg²⁺, a phosphate source, and a kinase; and

[0236] c) analyzing for the presence of a phosphorylated peptide product:

[0237] In some embodiments, the method for detecting kinase activity, comprising the step of:

[0238] determining phosphorylation of a compound of the invention using fluorescence of the compound.

[0239] Serine/threonine and tyrosine kinases can be used in the present invention. Exemplary Ser/Thr kinases include cAMP dependent protein kinase, protein kinase C, Ca/calmodulin-dependent kinases, AMP activated kinase, s6 kinases, eIF-2 kinases, p34^{cdc2} protein kinase, mitogen-activated protein kinases, casein kinase-2, casein kinase-1, glycogen synthase kinase-3, AURORA, Akt, Erk, ink, CDK2, and exemplary Tyr-specific protein kinases include Src Abl, insulin receptor kinase and EGFR among others.

[0240] For in vitro applications, the concentration of kinase can range from about 0.5 nM to about 100 nM, typically not more than about 500 nM, and preferably not more than about 250 nM. The concentrations of sensor can vary, but usually ranges between about 0.01 μM to 0.1 mM. Adenosine 5′-triphosphate (ATP) is the preferred source of phosphate, in stock solutions of about 10-100 mM. Because most kinases have Kₘ values for ATP in the range of about 10-150 μM, saturating concentrations of ATP are used to arrive at values of Kₘ and Vₘₐₓ for the substrates. Since this assay format can be used with any ATP concentration, 1 mM or ˜physiological concentrations are used unless being titrated. For in vivo applications, when the sensor is internalized into a cell, sufficient kinases, Mg²⁺ and phosphate sources exist in the cytosol. For in vivo sensing, a cellular internalization sequence can be included in the sensor design. Suitable cellular internalization sequences include Penetratins. HIV-Tat domains and poly-arginine sequences (Lindgren, M. et al. Trends Pharmacol. Sci. 2000, 21, 99-103; Wadia, J. S. et al. Curr Opin. Biotech. 2002, 13, 52-56; Carrigan, C. N. Analyt. Biochem. 2005, 341, 290-298).

[0241] For applications in which the kinase is dependent on cofactors, a source of cofactor is also included in the sample. For example, for certain PKC family enzymes, sources of Ca²⁺, phospholipid and diacylglycerol are needed.

[0242] The sensors of the present invention can be used to measure a kinase reaction continuously, as the metal-binding amino acid residues do not experience photobleaching.

### EXAMPLES

[0243] General Experimental

[0244] A fluorescence-based assay may be performed to determine the activity of a given protein kinase. This involves incubating the protein kinase with a suitable fluorescent peptide substrate and the co-substrates in an appropriate buffer and monitoring the change in fluorescence over time. Generally, a reaction mixture is prepared in the absence of a substrate peptide, which is then added to initiate the assay. The assay may be performed in a fluorimeter, where usually a single reaction is monitored at a time, or in a plate reader where multiple reactions may be monitored simultaneously.

[0245] This experimental may be modified based on various optimized reaction conditions as detailed in Examples 1-22.

[0246] Microtiter plates can be 96-, 384- or 1536-well formats. The final reaction volume is based on the manufacturers recommendations for each plate product, which may also vary based on the type of experiment, for example, 25-125 uL for Corning 96-well Half Area Flat Bottom Polystyrene NBSTM Microplates (Cat #3642) or 5-50 uL for Corning 384-well Low Volume Flat Bottom Polystyrene NBSTM Microplates (Cat #3824).

[0247] The reactions in each plate are incubated at the specified temperature and the fluorescence signal is monitored in kinetic mode using an appropriate microplate reader with an excitation wavelength of 365 nm and an emission wavelength of 485 nm Somewhat lower or higher wavelengths can also be used as long as the resulting signal is sufficient. Readings are made at preset intervals (e.g., every 5-30 seconds) over the desired time period (typically 30 min to 2 hours). Although the assay is most commonly monitored kinetically, it is also possible to stop the reactions using 5M Guanidine Hydrochloride to read the reactions in end point mode.

[0248] Setting up a reaction initiated with the peptide substrate:

1. Prepare Solution A (Assay reaction mixture comprises all reagents but the Sox-based Peptide Substrate) and incubate on ice:
2. Assay Reaction mixture:
[0249] i. Add 40 μL of the reaction mixture to each well of the 96-well plate, pre-warmed at 30° C.
[0250] ii. Incubate reactions at 30° C. in the plate reader for 5 minutes.
[0251] iii. Initiate the reactions with 10 μL of the 5× peptide solution, pre-warmed to 30° C.
[0252] iv. Monitor the change in fluorescence emission continuously at 485 nm during the linear phase of the reaction (conversion of the first 5-10% of the substrate to product) where readings are taken every 5-30 seconds (most plate readers have a setting that allows measurements to be determined at set time intervals).

[0253] Alternatively, solution B (Assay reaction mixture comprises all reagents but the protein kinase enzyme) or solution C (Assay reaction mixture comprises all reagents but the ATP) could be used and the reactions would be initiated in step 4 by addition of the enzyme or ATP respectively.

### Example 1: Receptor Tyrosine Kinase Activity

### Reaction Conditions:

### 50 mM HEPES, pH 7.4

### 10 mM MgCl₂

### 0.5 mM EGTA

### 10 μM Sox-based Peptide Substrate

### 1 mM ATP

### 1 mM DTT

### 0.01% Brij-35

[0254] 5 nM Carna Bioscience kinase (or alternative enzyme sources)
30 minute reaction at 30° C.

### * +3 to 300 μM MnCl₂

[0255] * Used for kinases that require MnCl₂

### Receptor-type Tyrosine Kinases:

### ALK (cat #08-518, lot #09CBS-0698F)

### EML4-ALK (cat #08-516, lot #09CBS-0483D

### NPM1-ALK (cat #08-517, lot #08CBS-1302D)

### ALK (G1269A) (cat #08-537, lot #12CBS-0530B)

### ALK (T1151_L1152 ins T)(cat #08-539, lot #12CBS-0810B)

### AXL (cat #08-107, lot #09CBS-0686J)

### EGFR (cat #08-115, lot #13CBS-0005P)*

[0256] EGFR (d746-750) (cat #08-527, lot #11CBS-0259E)*
EGFR (d746-750/T790M) (cat #08-528, lot #11CBS-0285H)*

### EGFR (L858R) (cat #08-502, lot #09CBS-0597E)*

### EGFR (T790M′L858R) (cat #08-510, lot #11CBS-0004B)*

### EPHA1 (cat #08-119, lot #10CBS-0048B)

### EPHA2 (cat #08-121, lot #08CBS-0480L)

### EPHA4 (cat #08-123, lot #08CBS-1014B)

### EPHA7 (cat #08-126, lot #07CBS-2615J)

### EPHA8 (cat #08-127, lot #07CBS-1584G)

### EPHB1 (cat #08-128, lot #09CBS-1144B)

### EPHB2 (cat #08-129, lot #07CBS-2306G)

### EPHB3 (cat #08-130, lot #06CBS-3285L)

### EPHB4 (cat #08-131, lot #07CBS-3269F)

### FGFR1 (cat #08-133, lot #12CBS-0123J)

### FGFR2 (cat #08-134, lot #07CBS-2468F)

### FGFR3 (cat #08-135, lot #12CBS-0744K)

### FGFR3 (K650E) (cat #08-501, lot #07CBS-1740H)

### FGFR3 (G697C) (cat #10-1-0000-1, lot #001)*

### FGFR4 (cat #08-136, lot #12CBS-0076F)

### FLT1 (cat #08-189, lot #09CBS-0092E)

### FLT4 (cat #08-190, lot #13CBS-0858B)

### HER2 (cat #08-016, lot #10CBS-0748T)*

### HER4 (cat #08-118, lot #08CBS-0652P)

### IGF1R (cat #08-141, lot #07CBS-0753B)

### INSR (cat #08-142, lot #07CBS-0620K)

### KDR (cat #08-191, lot #13CBS-0442G)

### KIT (cat #08-156, lot #11CBS-1067L)

### LTK (cat #08-106, lot #06CBS-2044L)

### MET (cat #08-151, lot #10CBS-1118N)

### MUSK (cat #08-153, lot #07CBS-0004J)*

### PDGFRα (cat #08-157, lot #009BS-1164B)

### PDGFRβ (cat #08-158, lot #08CBS-0282H)

### RET (cat #08-159, lot #13CBS-0134B)

### RON (cat #08-152, lot #08CBS-0903B)

### TIE2 (cat #08-185, lot #07CBS-2698H)

### TRKA (cat #08-186, lot #13CBS-0565M)

### TRKB (cat #08-187, lot #09CBS-0265G)

### TRKC (cat #08-197, lot #08CBS-0549F)

[0257] *Indicated enzyme obtained from ProQinase (other sources of kinases have also been validated)

### Example 2: Receptor Tyrosine Kinase Activity

### Reaction Conditions:

### 20 mM HEPES, pH 7.4

### 5 mM MgCl₂

### 0.1 mM EGTA

### 10 μM Sox-based Peptide Substrate

### 1 mM ATP

### 0.2 mM DTT

### 0.01% Brij-35

[0258] 5 nM Carna Bioscience kinase

### Example 3: CMGC Serine/Threonine Kinase Activity

### Reaction Conditions:

### 50 mM HEPES, pH 7.4

### 10 mM MgCl₂

### 0.5 mM EGTA

### 10 μM Sox-based Peptide Substrate

### 1 mM ATP

### 1 mM DTT

### 0.01% Brij-35

[0259] 5 nM Carna Bioscience kinase

### CMGC Serine Threonine Kinases:

### DYRK1A (cat #04-130, lot #10CBS-0742H)

### DYRK1B (cat #04-131, lot #13CBS-0831D)

### ERK1 (cat #04-142, lot #11CBS-0072E)

### ERK2 (cat #04-143, lot #10CBS-0740E)

### ERK5 (cat #04-146, lot #13CBS-0805B)

### ERK7 (cat #04-147, lot #09CBS-0079E)

### JNK1 (cat #04-163, lot #09CBS-0154B)

### JNK2 (cat #04-164, lot #07CBS-1214G)

### JNK3 (cat #04-150, lot #09CBS-0155G)

[0260] p38α (cat #04-152, lot #07CBS-0319H)
p38β (cat #04-153, lot #07CBS-0172D)
p38γ (cat #04-155, lot #07CBS-2630B)
p38δ (cat #04-154, lot #07CBS-2631B)

### MK2 (cat #07-142, lot #10CBS-0101B)

### Example 4: AGC Serine/Threonine Kinase Activity AQT0074 (Ac-ARKRERAYSF-C(Sx)-HHA-amide)

### Reaction Conditions:

### 50 mM HEPES, pH 7.4

### 10 mM MgCl₂

### 0.5 mM EGTA

### 10 μM Sox-based Peptide Substrate

### 1 mM ATP

### 1 mM DTT

### 0.01% Brij-35

[0261] 5 nM Carna Bioscience kinase

### *20 mM HEPES, pH 7.4

### 10 mM MgCl₂

### 0.1 mM EGTA

### 10 μM Peptide

### 0.1 mM ATP

### 1 mM DTT

### 0.01%0/Brij-35

### 0.3 mM CaCl₂

[0262] 0.5 μg/ml phosphatidylserine
0.1 μg/ml diacylglycerol
5 nM Carna Bioscience kinase

### AGC Serine/Threonine Kinases:

### AKT1 (cat #01-101, lot #08CBS-0149J)

### AKT2 (cat #01-102, lot #07CBS-3271B)

### AKT3 (cat #01-103, lot #09CBS-0605G)

### CRIK (cat #01-104, lot #11CBS-1034B)

[0263] p70S6K (cat #01-176, lot #14CBS-0617B)

### PASK (cat #02-128, lot #07CBS-1805E)

### PHKG2 (cat #02-153, lot #10CBS-0646B)

### PKACα (cat #01-127, lot #10CBS-0315N)

### PKACγ (cat #01-129, lot #12CBS-0329B)

### PKCα (cat #01-133, lot #09CBS-0233H)*

### PKCδ (cat #01-135, lot #07CBS-2223B)*

### PKCγ (cat #01-137, lot #07CBS-2676F)*

### SGK (cat #01-158, lot #09CBS-0646F)

### SGK2 (cat #01-159, lot #08CBS-0830B)

### SGK3 (cat #01-160, lot #08CBS-0586B)

### RSK1 (cat #01-149, lot #08CBS-0354K)

### Example 5: ABL Substrate Time Course

### Reaction Conditions:

### 20 mM HEPES, pH 7.4

### 5 mM MgCl₂

### 1 mM ATP

### 1 mM DTT

### 0.01% Brij-35

### 3.3 nM Protein Kinase:

[0264] ABL, amino acids 2-1130 Carna Bioscience (cat #08-001, lot #14CBS-0812 E)
ARG, amino acids 2-52, 74-1182 Carna Bioscience (cat #08-102, lot #07CBS-1313 B)
ABL(T3151), amino acids 2-1130 Carna Bioscience (cat #08-093, lot #08CBS-1142 B)
ABL(E255K), amino acids 2-1130 Carna Bioscience (cat #08-094, lot #08CBS-0324 B)
PDGFRβ, amino acids 557-1106 Carna Bioscience (cat #08-158, lot #08CBS-0282 H)
KIT, amino acids 544-976 Carna Bioscience (cat #08-156, lot #11CBS-1067 L)

### 10 μM Sox-based Peptide Substrate:

### AQT0030 (Ac-KKGEAIYA-C(Sx)-PFAKKK-NH₂)

### AQT0031 (Ac-KKGE-C(Sx)-IYAAPFAKKK-NH₂)

### AQT0032 (Ac-E-C(Sx)-IYAAPFAKKK-NH₂)

### AQT0033 (Ac-GAPE-C(Sx)-IYATPGAKKK-NH₂)

### AQT0034 (Ac-GAPEVIYA-C(Sx)-PGAKKK-NH₂)

### AQT0035 (Ac-E-C(Sx)-IYAAPF-NH₂

### AQT0036 (Ac-E-C(Sx)-IYA-NH₂

### AQT0037 (Ac-E-C(Sx)-IY-NH₂)

### AQT0038 (Ac-C(Sx)-IY-NH₂)

### AQT0039 (Ac-KKGEAIYA-C(Sx)-PF-NH₂)

### Reaction was run at 30′C.

### Example 6: Soluble Tyrosine Kinase Activity

### Reaction Conditions:

### 20 mM HEPES, pH 7.4

### 5 mM MgCl₂

### 0.1 mM EGTA

### 10 μM Sox-based Peptide Substrate

### 1 mM ATP

### 0.2 mM DTT

### 0.01% Brij-35

[0265] 5 nM Carna Bioscience kinase
30 minute reaction at 30° C.

### * +3-300 μM MnCl₂

### Soluble Tyrosine Kinases:

### ABL (cat #08-001, lot #14CBS-0812E)

### ABL (E255K) (cat #08-094, lot #08CBS-0324B)

### ABL (T3151) (cat #08-093, lot #11CBS-0498J)

### ACK (cat #08-196, lot #13CBS-0886B)

### ARG (cat #08-102, lot #07CBS-1313B)

### BLK (cat #08-164, lot #08CBS-1084B)

### BMX (cat #08-179, lot #08CBS-0426G)

### BRK (cat #08-165, lot #07CBS-2947D)

### BTK (cat #08-180, lot #14CBS-0619F)

### CSK (cat #08-111, lot #12CBS-0040E) *

### FAK (cat #08-137, lot #12CBS-0121E)

### FER (cat #08-139, lot #10CBS-0584B)

### FGR (cat #08-166, lot #10CBS-0459B)

### FRK (cat #08-167, lot #08CBS-1152G)

### FYN (cat #08-168, lot #11CBS-1043E)

### HCK (cat #08-169, lot #11CBS-0575B)

### ITK (cat #08-181, lot #13CBS-0356L)

### JAK1 (cat #08-144, lot #11CBS-0144T)

### JAK2 (cat #08-514, lot #08CBS-1002D)

### JAK3 (cat #08-046, lot #11CBS-0891E)

### LCK (cat #08-170, lot #10CBS-0924P)

### SRC (cat #08-173, lot #10CBS-1134F)

### SYK (cat #08-176, lot #13CBS-0926E)

### YES (cat #08-175, lot #09CBS-0412E)

### Example 7: EGFR Assay Optimization

[0266] Reaction Conditions (except where titrated):

### 20 mM HEPES, pH 7.4

### 1 mM ATP

### 1 mM DTT

### 0.01% Brij-35

### 0.1 mM EGTA

### 10 mM MgCl₂

### 3 μM MnCl₂

### 30 μM AQT0001 (Ac-EEEEYI-C(Sx)-IV-NH2) Sox-based Peptide Substrate

[0267] 2 nM EGFR, amino acids 669-1210

### Carna Bioscience (cat. & lot #: 08-115, 13CBS-0005P)

[0268] Reaction was run at 30° C. for 2 hours

### Example 8: Screen of Tyr Kinase Substrates with Tec

### Reaction Conditions:

### 50 mM HEPES, pH 7.5

### 1 mM ATP

### 1 mM DTT

### 0.01% Brij-35

### 0.5 mM EGTA

### 10 mM MgCl₂

### 10 μM Sox-based Peptide Substrate

[0269] 5 nM BTK, amino acids 2-659, Carna Bioscience (cat. & lot #: 08-080, 14CBS-0619F)
Reaction was run at 30′C for 60 minutes.

### Example 9: Serine/Threonine Kinase Activity Measured Using AQT's Panel of Substrates

### Reaction Conditions:

### 50 mM HEPES, pH 7.5

### 1 mM ATP

### 1 mM DTT

### 0.01% Brij-35

### 0.5 mM EGTA

### 10 mM MgCl₂

### 10 μM Sox-based Peptide Substrate

[0270] 5 nM AKT1, amino acids 104-480, Carna Bioscience (cat. & lot #: 01-101, 08CBS-0149J)
5 nM AKT2, amino acids 120-481, Carna Bioscience (cat. & lot #: 01-102, 07CBS-3271B)
5 nM AKT3, amino acids 108-479, Carna Bioscience (cat. & lot #: 01-103, 09CBS-0605G)

### Reaction run at 30° C. for 60 min.

### Example 10: CHEK1 (CAMK Group) Serine/Threonine Kinase Activity

### Reaction Conditions:

### 50 mM HEPES, pH 7.5

### 1 mM ATP

### 1 mM DTT

### 0.01% Brij-35

### 0.5 mM EGTA

### 10 mM MgCl₂

[0271] 10 μM CHK Sox-based peptide substrate
5 nM CHK1, amino acids 1-476, CARNA BS (cat. & lot #: 02-117, 08CBS-8008H)
Reaction was run at 30° C. for 120 minutes.

### Example 11: CHEK2 (CAMK Group) Serine/Threonine Kinase Activity

### Reaction Conditions:

### 50 mM HEPES, pH 7.5

### 1 mM ATP

### 1 mM DTT

### 0.01% Brij-35

### 0.5 mM EGTA

### 10 mM MgCl₂

### 10 μM CHK Sox-based Peptide Substrate

[0272] 5 nM CHK2, amino acids 1-543, CARNA BS (cat. & lot #: 02-162, 10CBS-0386B)
Reaction was run at 30′C for 120 minutes.

### Example 12: Comparison of a Panel of CSx and Sox-Pro (Y4) RTK Substrates for TrkA

### Reaction Conditions:

### 50 mM HEPES, pH 7.5

### 1 mM ATP

### 1 mM DTT

### 0.01% Brij-35

### 0.5 mM EGTA

### 10 mM MgCl₂

### 10 μM Sox-based Peptide Substrate

[0273] 5 nM* TRKA, amino acids 436-790

### Carna Bioscience (cat. & lot #: 08-186, 13CBS-0585M)

[0274] Reaction was run at 30° C. for 180 minutes.

### Example 13: EGFR Substrate Optimization (Mutant EGFRs)

### Reaction Conditions:

[0275] 50 mM HEPES, pH 7.5 5% glycerol 1 mM ATP 1 mM DTT 0.01% Brij-35 0.1% CHAPS 0.5 mM EGTA 10 mM MgCl2 250 μM MnCl2 10 μM Sox-based Peptide Substrate 5 nM EGFR:
[0276] Wild-type, amino acids 668-1210. BPS BS (cat. & lot #: 40187, 120321-GC)
[0277] Mutant (L858R/T790M), amino acids 668-1210. BPS BS (cat. & lot #: 40350, 150804-G2)
[0278] Mutant (L858R/T790M), amino acids 669-1210, CARNA BS (cat. & lot #: 08-510, 11CBS-0004B)
[0279] Mutant (L861Q), amino acids 669-1210, CARNA BS (cat. & lot #: 08-513, 10CBS-0896B)
[0280] Mutant (T790M), amino acids 669-1210, CARNA BS (cat. & lot #: 08-522, 07CBS-0923B)
[0281] Mutant (L858R), amino acids 669-1210, CARNA BS (cat. & lot #: 08-502, 09CBS-0597E)
[0282] Mutant (d746-750), amino acids 669-745, 751-1210, CARNA BS (cat. & lot #: 08-527, 11CBS-0259E)
[0283] Mutant (d746-750T790M), amino acids 669-745, 751-1210, CARNA BS (cat. & lot #: 08-528, 11CBS-0285H) Reaction was run at 30′C for 120 minutes.

### Example 14: Broad AGC Serine/Threonine Kinase Activity Measured Using PKA-S4 Including SGK1/2/3 and PRKACA/B

### Reaction Conditions:

### 50 mM HEPES, pH 7.5

### 1 mM ATP

### 1 mM DTT

### 0.01% Brij-35

### 0.5 mM EGTA

### 10 mM MgCl₂

### 10 μM PKA-S4 Sox-based Peptide Substrate

[0284] 5 nM kinase
Reaction was run at 30° C. for 120 minutes.

### Example 15: Substrates for SGK1, SGK2, SGK3 Identified from AQT's CSx Panel

### Reaction Conditions:

### 50 mM HEPES, pH 7.5

### 1 mM ATP

### 1 mM DTT

### 0.01% Brij-35

### 0.5 mM EGTA

### 10 mM MgCl₂

### 10 μM Sox-based Peptide Substrate

[0285] 5 nM SGK, amino acids 61-431. Carna Bioscience (cat. & lot #: 01-158, 09CBS-0646F)
5 nM SGK2, amino acids 1-367, Carna Bioscience (cat. & lot #: 01-159, 08CBS-0830B)
5 nM SGK3, amino acids 119-496, Carna Bioscience (cat. & lot #: 01-160, 08CBS-0586B)
Reaction was run at 30′C for 120 minutes.

### Example 16: AQT's Panel of CSx and Sox-Pro (Y4) RTK Substrates for TrkA

### Reaction Conditions:

### 50 mM HEPES, pH 7.5

### 1 mM ATP

### 1 mM DTT

### 0.01% Brij-35

### 0.5 mM EGTA

### 10 mM MgCl₂

### 10 μM Sox-based Peptide Substrate

[0286] 5 nM* TRKA, amino acids 436-790, Carna Bioscience (cat. & lot #: 08-186, 13CBS-0585M)
Reaction was run at 30° C. for 180 minutes.

### Example 17: Substrates for TRK RTKs

### Reaction Conditions:

### 50 mM HEPES, pH 7.5

### 1 mM ATP

### 1 mM DT

### 0.01% Brij-35

### 0.5 mM EGTA

### 10 mM MgCl₂

### 10 μM Sox-based Peptide Substrate

[0287] 5 nM TRKA, amino acids 442-796, BPS BS (cat. & lot #: 40280, 151113-G)
5 nM TRKB, amino acids 456-822, BPS BS (cat. & lot #: 40281, 130826)
5 nM TRKC, amino acids 456-825. BPS BS (cat. & lot #: 40282, 140205-G1)
Reaction was run at 30° C. for 150 minutes.

### Example 18: FGFR Substrate Optimization (Mutant FGFRs)

### Reaction Conditions:

### 50 mM HEPES, pH 7.5

### 1 mM ATP

### 1 mM DTT

### 0.01% Brij-35

### 0.5 mM EGTA

### 10 mM MgCl₂

### 10 μM Sox-based Peptide Substrate

[0288] 5 nM FGFR1, amino acids 396-820, CARNA BS (cat. & lot #: 08-133, 12CBS-0123J)
5 nM FGFR2, amino acids 399-821, CARNA BS (cat. & lot #: 08-134, 07CBS-2468F)
5 nM FGFR3, amino acids 436-806, CARNA BS (cat. & lot #: 08-135, 12CBS-0744K)
5 nM FGFR4, amino acids 460-802, CARNA BS (cat. & lot #: 08-136, 12CBS-0076F)
5 nM FGFR (K650E), amino acids 436-806, CARNA BS (cat. & lot #: 08-501, 07CBS-1740H)
5 nM FGFR (G697C), amino acids 397-806 Proqinase (cat. & lot #: 1071-0000-1, 001)
5 nM FGFR (K650M), amino acids 436-806, CARNA BS (cat. & lot #: 08-199, 08CBS-0670B)
5 nM FGFR (V555L), amino acids 436-806, CARNA BS (cat. & lot #: 08-548, 15CBS-0370B)
5 nM FGFR (V555M), amino acids 436-806, CARNA BS (cat. & lot #: 08-543, 12CBS-0565E)
Reaction was run at 30° C. for 90 minutes.

### Example 19: Fmoc-C(Sox[TBDPS])-OH Synthesis

[0289] a. Fmoc-Cys-OAlly

[chemical structure]

[0290] To an oven-dried, one-necked, 500 mL round-bottomed flask equipped with a stir bar and under positive N2 pressure was added Fmoc-Cys(Mmt)-OH (8.92 mmol, 5.49 g, 1 equiv. dissolved in 50 mL CH2Cl2) followed by MeOH (50 mL). The colorless solution then was allowed to stir for 3 min at room temperature. To this solution was added Cs₂CO₃ (4.46 mmol, 1.45 g, 0.5 equiv.) and mixture was allowed to stir at room temperature under N2 for 45 min at which time the solvent was removed in vacuo. The resulting white, fluffy solid was dissolved in DMF (100 mL, anhydrous) and immediately following this, allyl bromide (26.75 mmol, 3.24 g, 3 equiv.) was added. The reaction mixture was stirred at room temperature under positive N2 pressure for 5 hours. During this time, the reaction was monitored by TLC (Rf=0.23, 20% EtOAc in hexanes). Upon completion, the reaction mixture was diluted with EtOAc (1 L), washed with 2% NaHCO₃ (200 mL), H₂O (250 mL×3), brine (250 mL×3), dried (Na₂SO₄), and concentrated in vacuo.

[0291] The crude product from the previous step was dissolved in degassed, anhydrous CH2Cl2 (90 mL). To the slightly yellow solution were added TIS (5 mL) and TFA (5 mL). The resulting red solution was allowed to react at room temperature under N² for 2.5 hrs and was monitored by TLC (Rf=0.28, 20% EtOAc in hexanes). The reaction mixture turns a clear yellow color upon completion. The reaction then was diluted in CH2Cl2 (300 mL), washed with 5% NaHCO₃ (250 mL×2). H₂O (250 mL), brine (300 mL), dried (Na2SO4) and concentrated in vacuo. Flash column chromatography (SiO₂; diameter: 70 mm; length: 23 cm; packing: 20% EtOAc in hexanes; load crude product in CH2Cl2; eluent: 20% EtOAc in hexanes) was used to purify the product, which was isolated as a fluffy white solid. Yield: 69% (2.36 g), 1H NMR (400 MHz, CDCl₃, 20° C.) δ ppm: 1.38 (t, J=8.90 Hz, 1H), 3.10-2.94 (m, 2H), 4.24 (t, J=6.83 Hz, 1H), 4.49-4.38 (m, 2H), 4.78-4.62 (m, 3H), 5.29 (d, J=10.38 Hz, 1H), 5.37 (d, J=17.15 Hz, 1H), 5.72 (d, J=6.97 Hz, 1H), 5.98-5.88 (m, 1H), 7.33 (t, J=7.45 Hz, 2H), 7.41 (t, J=7.47 Hz, 2H), 7.61 (d, J=7.25 Hz, 2H), 7.77 (d, J=7.48 Hz, 2H), 13C NMR (100 MHz, CDCl₃, 20° C.) δ ppm: 27.1, 47.1, 55.2, 66.5, 67.1, 119.4, 120.0, 125.0, 127.1, 127.7, 131.2, 141.3, 143.7, 155.6, 169.6. HRMS (ESI): calcd for C21H21NNaO4S [M+Na]+: 406.1089, found: 406.1098.

[0292] b. Fmoc-Cys(Sox[TBDPS])-OAllyl

[chemical structure]

[0293] To an oven-dried, one-necked, 500 mL round-bottomed flask equipped with a stir bar and under positive N2 pressure was added Fmoc-Cys-OAllyl (4.98 mmol, 1.91 g, 1 equiv.) dissolved in anhydrous CH2Cl2 (70 mL). To this colorless solution was added Sox-Br₂ (4.98 mmol, 2.9 g, 1 equiv.) followed by freshly distilled DIEA (7.46 mmol, 1.3 mL, 1.5 equiv.). The reaction (pale yellow in color) was stirred at room temperature under the positive N2 pressure overnight and was monitored by TLC (Rf=0.36, 1:2 EtOAc in hexanes) until completion. The crude reaction was diluted with CH2Cl2 (400 mL), washed with sat'd. NH₄Cl (2×100 mL), H₂O (100 mL), brine (100 mL), dried (Na2SO4) and concentrated in vacuo. Flash column chromatography (SiO2; diameter: 70 mm; length: 26 cm; packing: 10% EtOAc in hexanes; load crude product in CH2Cl2; eluent: 10, 20, 30% EtOAc in hexanes) was used to isolate the product as a white solid. Yield: 95% (3.43 g).

[0294] 1H NMR (400 MHz, CDCl₃, 20° C.) δ ppm: 1.18 (s, 9H), 2.82-2.67 (m, 2H), 2.72 (s, 6H), 3.57 (m, 2H), 4.24 (t, J=7.04 Hz, 1H), 4.45-4.34 (m, 2H), 4.68-4.48 (m, 3H), 5.22 (dd, J=10.42, 1.09 Hz, 1H), 5.28 (dd, J=17.19, 1.23 Hz, 1H), 5.51 (d, J=8.13 Hz, 1H), 5.89-5.78 (m, 1H), 7.11 (d, J=8.32 Hz, 1H), 7.34-7.29 (m, 6H), 7.45-7.35 (m, 4H), 7.53 (d, J=8.97 Hz, 1H), 7.61 (dd, J=7.21, 2.86 Hz, 2H), 7.78-7.75 (m, 6H), 7.99 (d, J=8.32 Hz, 1H), 8.95 (d, J=8.96 Hz, 1H), 13C NMR (100 MHz. CDCl₃, 20° C.) δ ppm: 20.0, 26.4, 34.1, 37.2, 38.2, 46.9, 53.3, 66.2, 67.1, 115.3, 118.9, 119.9, 122.3, 123.7, 125.0, 125.1, 127.0, 127.6, 127.6, 129.6, 131.1, 131.6, 133.3, 133.3, 134.2, 134.8, 140.3, 141.1, 143.6, 143.6, 155.5, 156.8, 157.1, 170.1.

[0295] HRMS (ESI): calcd for C49H51N3NaO7S2Si [M+Na]+: 908.2835, found: 908.2827.

[0296] c. Fmoc-Cys(Sox[TBDPS])-OH

[chemical structure]

[0297] To an oven-dried, one-necked, 250 mL round-bottomed flask equipped with a stir bar and under positive N2 pressure was added Fmoc-Cys(Sox[TBPDS])-OAllyl (3.62 mmol, 3.21 g, 1 equiv.) dissolved in anhydrous and degassed CH2Cl2 (100 mL). To the pale red solution was added PhSiH3 (90.47 mmol, 11.2 mL, 25 equiv.) followed by Pd(PPh3)4 (0.145 mmol, 167.26 mg, 0.04 equiv.). After 10 min the reaction turned a deep red color. The resulting mixture was stirred at room temperature under the positive N2 pressure for 3 hours and was monitored by TLC (Rf=0.36, 10% MeOH in CH2Cl2). Upon completion of the reaction, the solvent was removed in vacuo. The crude mixture was passed through a short flash column (SiO2; diameter: 70 mm; length: 7 cm; packing: CH2Cl2; load crude product in CH2Cl2; eluent: 1, 2, 3, 4, 5, 10, 15% MeOH in CH2Cl2) to obtain 77%6 recovery of product. Analytical HPLC revealed one peak (tR=32.1 min; loading: dissolve 3 mg in DMSO; injection: 12 μL, method: 5% B (5 min)→20% B (1 min)→95% B (30 min), Abs: 280 nm and 316 nm) that was determined by ESI-MS to be Fmoc-C(Sox)-OH (calcd for C30H30N307S2 [M+H]+: 608.15, found: 608.1) since the acidic conditions of HPLC solvents remove the TBDPS protecting group. 1H NMR, prior to HPLC analysis, shows that the TBDPS protecting group is still present in the crude material. The amino acid was used in SPPS without further purification.

[0298] HRMS (ESI) of Fmoc-C(Sox[TBDPS])-OH: calcd for C46H47N3NaO7S2Si [M+Na]+: 868.2522, found: 868.2540.

### Example 20: Peptide Synthesis

[0299] a. Coupling Chemistry and Conditions

[0300] All peptides were synthesized using the standard Fmoc-based amino acid protection chemistry using a variety of methods. For example, in some cases, peptides were synthesized on Fmoc-PAL-PEG-PS resin (Applied Biosystems, 0.19 mmol/g) using either the on-resin alkylation (vide infra) or the Fmoc-C(Sox[TBDPS])-OH building block. In other cases, peptides were synthesized on Fmoc-Gly-NovaSyn TGT resin (Novabiochem, 0.20 mmol/g) using the C-Sox building block. The resin was swelled in CH2Cl2 (5 min.) and then DMF (5 min) prior to synthesis. All the amino acids except for Fmoc-C(Sox[TBDPS])-OH were coupled according to the following procedure: Fmoc deprotection (20% 4-methylpiperidine in DMF, 3×5 min), rinsing step (DMF, 5×), coupling step (amino acid/PyBOP/HOBt/DIEA, 6:6:6:6, 0.15 M in DMF, 30-45 min), rinsing step (DMF, 5 x; CH2Cl2, 5×). Fmoc-C(Sox[TBDPS])-OH was coupled in the following manner: amino acid/PyAOP/HOAt/DIEA, 2:2:2:5, 0.15 M in DMF, 2-12 hr. The coupling was repeated if necessary (amino acid/PyAOP/HOAt/DIEA, 1:1:1:3, 0.15 M in DMF, 2-12 hr) as determined by the TNBS test for free amines. It is important to wash the resin rigorously (DMF followed by CH2Cl2) to remove excess amino acid before performing any tests for free amines. This is particularly necessary after coupling of Fmoc-C(Sox[TBDPS])-OH due to its deep red color, which does not affect its coupling efficiency. At the end of the synthesis, the Fmoc group was removed with 20% 4-methylpiperidine in DMF (3×5 min.) and the resin was rinsed with DMF (5×). The resin-attached free amines were capped by exposure to Ac2O (20 equiv.) and pyridine (20 equiv.) in DMF for 30 min. The resin was rinsed with DMF (5×), CH2Cl2 (5×) and subjected to 20% 4-methylpiperidine in DMF (3×5 min.) to remove any Sox aryl esters that might have formed during acetylation. The resin was finally washed with DMF, CH2Cl2, MeOH (5× each) and dried under vacuum. Different variations on the above methods may be required to improve yield and purity of the desired chemosensor.

[0301] b. On-Resin Alkylation of Peptides with Sox-Br

[0302] Resin-bound peptides (50 mg, 0.0095 mmol, 1 equiv.) incorporating Cys(Mmt) were swelled in CH2Cl2, then DMF (5 min each). The Mmt protecting group was removed from the resin-bound peptide by bubbling N2 through a solution of 1% TFA, 5% TIS in CH₂Cl₂ (4×20 min or until most of the yellow color due to the Mmt cation has disappeared). The resin then was subjected to rigorous washing with CH2Cl2 (5×) and DMF (5×). Anhydrous DMF (200 μL) was added to the resin followed by freshly distilled tetramethylguanidine (5.96 μL, 0.0475 mmol, 5 equiv.). The mixture was incubated for 2-3 min. Sox-Br (17 mg, 0.0285 mmol, 3 equiv.) was dissolved in anhydrous DMF (150 μL) and added to the resin. After ca. 12 hours of reaction time, the excess reagents were drained and the resin washed with DMF, CH₂C₂, MeOH, CH₂Cl₂ (5× each). Different variations on the above methods may be required to improve yield and purity of the desired chemosensor.

[0303] c. Side Chain Deprotection and Cleavage from Resin

[0304] The resin cleavage and protecting group removal was achieved by exposing the resin-bound peptides to TFA/EDT/H2O/TIS (94:2.5:2.5:1% v/v) for sequences containing easily oxidized residues (e.g. Cys, Met, Trp) or TFA/H₂O/TIS (95:2.5:2.5% v/v) for sequences without such residues (C-Sox does not require EDT in the cleavage cocktail). The resulting solution was concentrated under a stream of N2 and precipitated by addition of cold Et2O. The pellet was triturated with cold Et2O (3×), redissolved in water, filtered and lyophilized. The peptides were purified by preparative reverse-phase HPLC using UV detection at either 228 nm (amide bond absorption) and 280 nm (Fmoc, Trp, and/or Tyr absorption) or 228 nm and 316 nm (Sox absorption). Only fractions showing a single peak of correct mass by analytical HPLC were used in further experiments.

[0305] Characterization of Purified Peptides.

[0306] The purity of the synthetic peptides was assessed by reversed-phase HPLC and identity was confirmed by ESI-MS, prior to characterizing specificity (testing with a panel of protein kinases) and enzyme kinetic properties with the target kinase.

### Example 21: Representative Peptides

[0307] The following peptides were synthesized as previous described, and characterized as followed:

[0308] Ac-EEPITI-C(Sx)-VP-amide (AQT0026-Sx): MW: calc. (mono MW): 1366.6 Da; exp (avg): 1367.6 Da; HPLC-purity: expected 95+%; measured: 99.85%; Mass Spec. TOF: 684.3; Tandem Mass Spec.: 114.0, 171.0, 227.9; 510.2; 580.2; 673.3; 682.5; 786.4; 952.4; 1066.5; 1195.6; 1252.5.

[0309] Ac-EDPEYI-C(Sx)-IP-amide (AQT0099-BBCSx): MW: calc. (mono MW): 1382.5 Da; exp (avg): 1383.5 Da; HPLC-purity: expected 95+%; measured: 95.51%; Mass Spec. TOF: 892.2; Tandem Mass Spec.; 114.1, 69.1, 286.2, 548.9, 694.4, 805.9.

[0310] Ac-GRPRAATF-C(SY)-EG-amide (AQT0076-Sx): MW: calc. (mono MW): 1468.6 Da; exp (avg): 1469.5 Da; HPLC-purity: expected 95+%; measured: 96.35%; Mass Spec. TOF: 735.3; Tandem Mass Spec.: 119.0, 227.1, 268.9, 285.1, 296.0, 633.3, 733.8, 870.4, 967.4, 1375.5.

[0311] Ac-C(S)-LSPGPF-amide (AQT0082-Sx): MW: calc. (mono MW): 1024.4 Da; exp (avg): 1025.2 Da; HPLC-purity: expected 95+%; measured: 99.28%; Mass Spec. TOF: 1025.41; Tandem Mass Spec.: 399.2, 415.2, 502.2, 615.3, 1007.4, 1024.4.

[0312] While the invention has been described with reference to certain embodiments, other features may be included without departing from the spirit and scope of the invention. It is therefore intended that the foregoing detailed description be regarded as illustrative rather than limiting, and that it be understood that it is the following claims, including all equivalents, that are intended to define the spirit and scope of this invention

1.-112. (canceled)

113. A method for detecting kinase activity, comprising the steps of:
a) providing a compound;
b) contacting the compound with a sample comprising Mg²⁺, a phosphate source, and a kinase; and
c) analyzing for the presence of a phosphorylated peptide product;
wherein:
the compound is an oligopeptide comprising a fluorophore; and a S, T or Y residue at the +2 or −2 position relative to the fluorophore.

114.-117. (canceled)

118. A method, comprising the step of:
determining phosphorylation of a compound using fluorescence of the compound; wherein:
the compound is an oligopeptide comprising a fluorophore; and a (phospho)S, a (phospho)T, or a (phospho)Y residue at the +2 or −2 position relative to the fluorophore.

119.-120. (canceled)

121. A compound selected from the group consisting of: X-EEPIY*V-C(Sx)-FG-Z (SEQ ID NO: 531), X-EEPIY*V-C(Sx)-VK-Z (SEQ ID NO: 547), X-EEPEY*I-C(Sx)-FG-Z (SEQ ID NO: 407), X-EEPEY*I-C(Sx)-FK-Z (SEQ ID NO: 408), X-EEPEY*I-C(Sx)-FP-Z (SEQ ID NO: 409), X-EEPEY*I-C(Sx)-IG-Z (SEQ ID NO: 410), X-EEPEY*I-C(Sx)-IK-Z (SEQ ID NO: 411), X-EEPEY*I-C(Sx)-IP-Z (SEQ ID NO: 412), X-EEPEY*I-C(Sx)-MG-Z (SEQ ID NO: 413), X-EEPEY*I-C(Sx)-MK-Z (SEQ ID NO: 414), X-EEPEY*I-C(Sx)-MP-Z (SEQ ID NO: 415), X-EEPEY*I-C(Sx)-VG-Z (SEQ ID NO: 416), X-EEPEY*I-C(Sx)-VK-Z (SEQ ID NO: 417), X-EEPEY*V-C(Sx)-FG-Z (SEQ ID NO: 419), X-EEPEY*V-C(Sx)-FK-Z (SEQ ID NO: 420), X-EEPEY*V-C(Sx)-FP-Z (SEQ ID NO: 421), X-EEPEY*V-C(Sx)-IG-Z (SEQ ID NO: 422), X-EEPEY*V-C(Sx)-IK-Z (SEQ ID NO: 423), X-EEPEY*V-C(Sx)-IP-Z (SEQ ID NO: 424), X-EEPEY*V-C(Sx)-MG-Z (SEQ ID NO: 425), X-EEPEY*V-C(Sx)-MK-Z (SEQ ID NO: 426), X-EEPEY*V-C(Sx)-MP-Z (SEQ ID NO: 427), X-EEPEY*V-C(Sx)-VG-Z (SEQ ID NO: 428), X-EEPEY*V-C(Sx)-VK-Z (SEQ ID NO: 429), and X-EEPEY*V-C(Sx)-VP-Z (SEQ ID NO: 430), X-EEPIY*F-C(Sx)-FG-Z (SEQ ID NO: 458), X-EEPIY*F-C(Sx)-FK-Z (SEQ ID NO: 459), X-EEPIY*F-C(Sx)-FP-Z (SEQ ID NO: 461), X-EEPIY*F-C(Sx)-IG-Z (SEQ ID NO: 462), X-EEPIY*F-C(Sx)-IK-Z (SEQ ID NO: 463), X-EEPIY*F-C(Sx)-IP-Z (SEQ ID NO: 465), X-EEPIY*F-C(Sx)-MG-Z (SEQ ID NO: 469), X-EEPIY*F-C(Sx)-MK-Z (SEQ ID NO: 470), X-EEPIY*F-C(Sx)-MP-Z (SEQ ID NO: 472), X-EEPIY*F-C(Sx)-VG-Z (SEQ ID NO: 473), X-EEPIY*F-C(Sx)-VK-Z (SEQ ID NO: 474), X-EEPIY*I-C(Sx)-FG-Z (SEQ ID NO: 483), X-EEPIY*I-C(Sx)-FK-Z (SEQ ID NO: 484), X-EEPIY*I-C(Sx)-IG-Z (SEQ ID NO: 487), X-EEPIY*I-C(Sx)-IK-Z (SEQ ID NO: 488), X-EEPIY*I-C(Sx)-MG-Z (SEQ ID NO: 494), X-EEPIY*I-C(Sx)-MK-Z (SEQ ID NO: 495), X-EEPIY*V-C(Sx)-FK-Z (SEQ ID NO: 532), X-EEPIY*V-C(Sx)-FP-Z (SEQ ID NO: 534), X-EEPIY*V-C(Sx)-IG-Z (SEQ ID NO: 535), X-EEPIY*V-C(Sx)-IK-Z (SEQ ID NO: 536), X-EEPIY*V-C(Sx)-IP-Z (SEQ ID NO: 538), X-EEPIY*V-C(Sx)-MG-Z (SEQ ID NO: 542), X-EEPIY*V-C(Sx)-MK-Z (SEQ ID NO: 543), X-EEPIY*V-C(Sx)-MP-Z (SEQ ID NO: 545), X-EEPIY*V-C(Sx)-VG-Z (SEQ ID NO: 546), X-EEPPD-C(Sx)-QY*[pY]NDFPGK-Z (SEQ ID NO: 974), X-EEPPD-C(Sx)-QY*YNDFPGK-Z (SEQ ID NO: 973), X-EGRNPGFY*V-C(Sx)-ANPMP-Z (SEQ ID NO: 967), X-EGSFESRY*Q-C(Sx)-PFEDF-Z (SEQ ID NO: 965), X-EPIQEANY*V-C(Sx)-MTPGT-Z (SEQ ID NO: 955), X-EPPDHQYY*N-C(Sx)-FPGKE-Z (SEQ ID NO: 975), X-EQEDEPE-C(Sx)-DY*EEVLE-Z (SEQ ID NO: 5003), X-EQEDEPE-C(Sx)-DY*FEWLE-Z (SEQ ID NO: 5004), X-EQEDEPEGDY*E-C(Sx)-VLE-Z (SEQ ID NO: 5005), X-EQEDEPEGDY*F-C(Sx)-WLE-Z (SEQ ID NO: 5006), X-EVSETDDY*A-C(Sx)-DEE-Z (SEQ ID NO: 5007), X-FAGKE-C(Sx)-TY*[pY]QGRHLG-Z (SEQ ID NO: 980), X-FAGKE-C(Sx)-TY*YQGRHLG-Z (SEQ ID NO: 979), X-FD[Nle]DR-C(Sx)-IY*RMSFFRK-Z (SEQ ID NO: 5008), X-FD[Nle]DRDIY*R-C(Sx)-SFFRK-Z (SEQ ID NO: 5009), X-FDKDGNGY*I-C(Sx)-AAELR-Z (SEQ ID NO: 930), X-FDMDR-C(Sx)-IY*RMSFFRK-Z (SEQ ID NO: 5010), X-FDMDRDIY*R-C(Sx)-SFFRK-Z (SEQ ID NO: 5011), X-FEEEEY*I-C(Sx)-Z (SEQ ID NO: 5012), X-FEEEY*I-C(Sx)-IV-Z (SEQ ID NO: 5013), X-FTDRL-C(Sx)-QY*ISTRGLG-Z (SEQ ID NO: 919), X-FTDRLQQY*I-C(Sx)-TRGLG-Z (SEQ ID NO: 920), and X-FVSETDDY*A-C(Sx)-IIDEE-Z (SEQ ID NO: 5014); or
a compound selected from the group consisting of: X-C(Sx)-HS*LPRFNR-Z (SEQ ID NO: 1409), X-C(Sx)-FS*LRRKAA-Z (SEQ ID NO: 1361), X-C(Sx)-FS*LRRKAD-Z (SEQ ID NO: 1362), X-C(Sx)-FS*LRRKAE-Z (SEQ ID NO: 1363), X-C(Sx)-FS*LRRKAF-Z (SEQ ID NO: 1364), X-C(Sx)-FS*LRRKAG-Z (SEQ ID NO: 1365), X-C(Sx)-FS*LRRKAH-Z (SEQ ID NO: 1366), X-C(Sx)-FS*LRRKAI-Z (SEQ ID NO: 1367), X-C(Sx)-FS*LRRKAL-Z (SEQ ID NO: 1368), X-C(Sx)-FS*LRRKAN-Z (SEQ ID NO: 1369), X-C(Sx)-FS*LRRKAP-Z (SEQ ID NO: 1370), X-C(Sx)-FS*LRRKAQ-Z (SEQ ID NO: 1371), X-C(Sx)-FS*LRRKAR-Z (SEQ ID NO: 1372), X-C(Sx)-FS*LRRKAV-Z (SEQ ID NO: 1373), X-C(Sx)-FS*LRRKAW-Z (SEQ ID NO: 1374), X-C(Sx)-FS*LRRKDK-Z (SEQ ID NO: 1375), X-C(Sx)-FS*LRRKEK-Z (SEQ ID NO: 1376), X-C(Sx)-FS*LRRKFK-Z (SEQ ID NO: 1377), X-C(Sx)-FS*LRRKGK-Z (SEQ ID NO: 1378), X-C(Sx)-FS*LRRKHK-Z (SEQ ID NO: 1379), X-C(Sx)-FS*LRRKIK-Z (SEQ ID NO: 1380), X-C(Sx)-FS*LRRKKK-Z (SEQ ID NO: 1381), X-C(Sx)-FS*LRRKLK-Z (SEQ ID NO: 1382), X-C(Sx)-FS*LRRKNK-Z (SEQ ID NO: 1383), X-C(Sx)-FS*LRRKPK-Z (SEQ ID NO: 1384), X-C(Sx)-FS*LRRKQK-Z (SEQ ID NO: 1385), X-C(Sx)-FS*LRRKRK-Z (SEQ ID NO: 1386), X-C(Sx)-FS*LRRKVK-Z (SEQ ID NO: 1387), X-C(Sx)-FS*LRRKWK-Z (SEQ ID NO: 1388), X-C(Sx)-FS*LRRLAK-Z (SEQ ID NO: 1389), X-C(Sx)-FS*LRRNAK-Z (SEQ ID NO: 1390), X-C(Sx)-FS*LRRPAK-Z (SEQ ID NO: 1391), X-C(Sx)-FS*LRRQAK-Z (SEQ ID NO: 1392), X-C(Sx)-FS*LRRRAK-Z (SEQ ID NO: 1393), X-C(Sx)-FS*LRRVAK-Z (SEQ ID NO: 1394), X-C(Sx)-FS*LRRWAK-Z (SEQ ID NO: 1395), X-C(Sx)-FS*LRVKAK-Z (SEQ ID NO: 1396), X-C(Sx)-FS*LRWKAK-Z (SEQ ID NO: 1397), X-C(Sx)-FS*LVRKAK-Z (SEQ ID NO: 1398), X-C(Sx)-FS*LWRKAK-Z (SEQ ID NO: 1399), X-C(Sx)-FS*NRRKAK-Z (SEQ ID NO: 1400), X-C(Sx)-FS*PRRKAK-Z (SEQ ID NO: 1401), X-C(Sx)-FS*QRRKAK-Z (SEQ ID NO: 1402), X-C(Sx)-FS*RRRKAK-Z (SEQ ID NO: 1403), X-C(Sx)-FS*VRRKAK-Z (SEQ ID NO: 1404), X-C(Sx)-FS*WRRKAK-Z (SEQ ID NO: 1405), X-C(Sx)-GS*LRRKAK-Z (SEQ ID NO: 1406), X-C(Sx)-HS*LKRGNR-Z (SEQ ID NO: 1407), X-C(Sx)-HS*LKRKNR-Z (SEQ ID NO: 1408), X-C(Sx)-HS*LPRKNK-Z (SEQ ID NO: 1410), X-C(Sx)-HS*LRRKAK-Z (SEQ ID NO: 1411), X-C(Sx)-IS*LRRKAK-Z (SEQ ID NO: 1412), X-C(Sx)-KS*LRRKAK-Z (SEQ ID NO: 1413), X-C(Sx)-KS*PAKEKAKSPEK-Z (SEQ ID NO: 1414), X-C(Sx)-LS*FAEG-Z (SEQ ID NO: 1415), X-C(Sx)-LS*FAEPG-Z (SEQ ID NO: 1416), X-C(Sx)-LS*FRRR-Z (SEQ ID NO: 1019), X-C(Sx)-LS*LRRKAK-Z (SEQ ID NO: 1417), X-C(Sx)-LS*QEAFADLWKK-Z (SEQ ID NO: 1418), X-C(Sx)-NS*LRRKAK-Z (SEQ ID NO: 1419), X-C(Sx)-PS*LRRKAK-Z (SEQ ID NO: 1420), X-C(Sx)-QS*LRRKAK-Z (SEQ ID NO: 1421), X-C(Sx)-QS*QEAFADLWKK-Z (SEQ ID NO: 1422), X-C(Sx)-QS*QETFS*DLWKK-Z (SEQ ID NO: 1423), and X-C(Sx)-RS*LRRKAK-Z (SEQ ID NO: 1424); or
a compound selected from the group consisting of: X-EDPEY*I-C(Sx)-IP-Z (SEQ ID NO: 304), X-DVVDADEY*L-C(Sx)-PQQGF-Z (SEQ ID NO: 938), X-ED-C(Sx)-DY*EWPSA-Z (SEQ ID NO: 4867), X-EDE-C(Sx)-IY*EELDEP-Z (SEQ ID NO: 4868), X-EDEDIY*E-C(Sx)-LDEP-Z (SEQ ID NO: 4869), X-EDEG-C(Sx)-RY*LKLEED-Z (SEQ ID NO: 4870), X-EDEGDRY*L-C(Sx)-LEED-Z (SEQ ID NO: 4871), X-EDGGDDIY*E-C(Sx)-IIKVE-Z (SEQ ID NO: 986), X-EDPDY*E-C(Sx)-PSA-Z (SEQ ID NO: 4872), X-EDPDY*F-C(Sx)-FG-Z (SEQ ID NO: 251), X-EDPDY*F-C(Sx)-FK-Z (SEQ ID NO: 252), X-EDPDY*F-C(Sx)-FP-Z (SEQ ID NO: 253), X-EDPDY*F-C(Sx)-IG-Z (SEQ ID NO: 254), X-EDPDY*F-C(Sx)-IK-Z (SEQ ID NO: 255), X-EDPDY*F-C(Sx)-IP-Z (SEQ ID NO: 256), X-EDPDY*F-C(Sx)-MG-Z (SEQ ID NO: 257), X-EDPDY*F-C(Sx)-MK-Z (SEQ ID NO: 258), X-EDPDY*F-C(Sx)-MP-Z (SEQ ID NO: 259), X-EDPDY*F-C(Sx)-VG-Z (SEQ ID NO: 260), X-EDPDY*F-C(Sx)-VK-Z (SEQ ID NO: 261), X-EDPDY*F-C(Sx)-VP-Z (SEQ ID NO: 262), X-EDPDY*I-C(Sx)-FG-Z (SEQ ID NO: 263), X-EDPDY*I-C(Sx)-FK-Z (SEQ ID NO: 264), X-EDPDY*I-C(Sx)-FP-Z (SEQ ID NO: 265), X-EDPDY*I-C(Sx)-IG-Z (SEQ ID NO: 266), X-EDPDY*I-C(Sx)-IK-Z (SEQ ID NO: 267), X-EDPDY*I-C(Sx)-IP-Z (SEQ ID NO: 268), X-EDPDY*I-C(Sx)-MG-Z (SEQ ID NO: 269), X-EDPDY*I-C(Sx)-MK-Z (SEQ ID NO: 270), X-EDPDY*I-C(Sx)-MP-Z (SEQ ID NO: 271), X-EDPDY*I-C(Sx)-VG-Z (SEQ ID NO: 272), X-EDPDY*I-C(Sx)-VK-Z (SEQ ID NO: 273), X-EDPDY*I-C(Sx)-VP-Z (SEQ ID NO: 274), X-EDPDY*V-C(Sx)-FG-Z (SEQ ID NO: 275), X-EDPDY*V-C(Sx)-FK-Z (SEQ ID NO: 276), X-EDPDY*V-C(Sx)-FP-Z (SEQ ID NO: 277), X-EDPDY*V-C(Sx)-IG-Z (SEQ ID NO: 278), X-EDPDY*V-C(Sx)-IK-Z (SEQ ID NO: 279), X-EDPDY*V-C(Sx)-IP-Z (SEQ ID NO: 280), X-EDPDY*V-C(Sx)-MG-Z (SEQ ID NO: 281), X-EDPDY*V-C(Sx)-MK-Z (SEQ ID NO: 282), X-EDPDY*V-C(Sx)-MP-Z (SEQ ID NO: 283), X-EDPDY*V-C(Sx)-VG-Z (SEQ ID NO: 284), X-EDPDY*V-C(Sx)-VK-Z (SEQ ID NO: 285), X-EDPDY*V-C(Sx)-VP-Z (SEQ ID NO: 286), X-EDPEY*F-C(Sx)-FG-Z (SEQ ID NO: 287), X-EDPEY*F-C(Sx)-FK-Z (SEQ ID NO: 288), X-EDPEY*F-C(Sx)-FP-Z (SEQ ID NO: 289), X-EDPEY*F-C(Sx)-IG-Z (SEQ ID NO: 290), X-EDPEY*F-C(Sx)-IK-Z (SEQ ID NO: 291), X-EDPEY*F-C(Sx)-IP-Z (SEQ ID NO: 292), X-EDPEY*F-C(Sx)-MG-Z (SEQ ID NO: 293), X-EDPEY*F-C(Sx)-MK-Z (SEQ ID NO: 294), X-EDPEY*F-C(Sx)-MP-Z (SEQ ID NO: 295), X-EDPEY*F-C(Sx)-VG-Z (SEQ ID NO: 296), X-EDPEY*F-C(Sx)-VK-Z (SEQ ID NO: 297), X-EDPEY*F-C(Sx)-VP-Z (SEQ ID NO: 298), X-EDPEY*I-C(Sx)-FG-Z (SEQ ID NO: 299), X-EDPEY*I-C(Sx)-FK-Z (SEQ ID NO: 300), X-EDPEY*I-C(Sx)-FP-Z (SEQ ID NO: 301), X-EDPEY*I-C(Sx)-IG-Z (SEQ ID NO: 302), X-EDPEY*I-C(Sx)-IK-Z (SEQ ID NO: 303), X-EDPEY*I-C(Sx)-MG-Z (SEQ ID NO: 305), X-EDPEY*I-C(Sx)-MK-Z (SEQ ID NO: 306), X-EDPEY*I-C(Sx)-MP-Z (SEQ ID NO: 307), X-EDPEY*I-C(Sx)-VG-Z (SEQ ID NO: 308), X-EDPEY*I-C(Sx)-VK-Z (SEQ ID NO: 309), X-EDPEY*I-C(Sx)-VP-Z (SEQ ID NO: 310), X-EDPEY*V-C(Sx)-FG-Z (SEQ ID NO: 311), X-EDPEY*V-C(Sx)-FK-Z (SEQ ID NO: 312), X-EDPEY*V-C(Sx)-FP-Z (SEQ ID NO: 313), X-EDPEY*V-C(Sx)-IG-Z (SEQ ID NO: 314), X-EDPEY*V-C(Sx)-IK-Z (SEQ ID NO: 315), X-EDPEY*V-C(Sx)-IP-Z (SEQ ID NO: 316), X-EDPEY*V-C(Sx)-MG-Z (SEQ ID NO: 317), X-EDPEY*V-C(Sx)-MK-Z (SEQ ID NO: 318), X-EDPEY*V-C(Sx)-MP-Z (SEQ ID NO: 319), X-EDPEY*V-C(Sx)-VG-Z (SEQ ID NO: 320), X-EDPEY*V-C(Sx)-VK-Z (SEQ ID NO: 321), and X-EDPEY*V-C(Sx)-VP-Z (SEQ ID NO: 322); or
a compound selected from the group consisting of: X-KKKKVKKRPQRADS*D-C(Sx)-FA-Z (SEQ ID NO: 3457), X-KKKKRKKRPQRATSD-C(Sx)-FS*-Z (SEQ ID NO: 3429), X-KKKKRKKRPQRATSN-C(Sx)-FS*-Z (SEQ ID NO: 3430), X-KKKKTKKRPQRADS*D-C(Sx)-FA-Z (SEQ ID NO: 3431), X-KKKKTKKRPQRADS*D-C(Sx)-FS-Z (SEQ ID NO: 3432), X-KKKKTKKRPQRADS*N-C(Sx)-FA-Z (SEQ ID NO: 3433), X-KKKKTKKRPQRADS*N-C(Sx)-FS-Z (SEQ ID NO: 3434), X-KKKKTKKRPQRADSD-C(Sx)-FS*-Z (SEQ ID NO: 3435), X-KKKKTKKRPQRADSN-C(Sx)-FS*-Z (SEQ ID NO: 3436), X-KKKKTKKRPQRAES*D-C(Sx)-FA-Z (SEQ ID NO: 3437), X-KKKKTKKRPQRAES*D-C(Sx)-FS-Z (SEQ ID NO: 3438), X-KKKKTKKRPQRAES*N-C(Sx)-FA-Z (SEQ ID NO: 3439), X-KKKKTKKRPQRAES*N-C(Sx)-FS-Z (SEQ ID NO: 3440), X-KKKKTKKRPQRAESD-C(Sx)-FS*-Z (SEQ ID NO: 3441), X-KKKKTKKRPQRAESN-C(Sx)-FS*-Z (SEQ ID NO: 3442), X-KKKKTKKRPQRAHS*D-C(Sx)-FA-Z (SEQ ID NO: 3443), X-KKKKTKKRPQRAHS*D-C(Sx)-FS-Z (SEQ ID NO: 3444), X-KKKKTKKRPQRAHS*N-C(Sx)-FA-Z (SEQ ID NO: 3445), X-KKKKTKKRPQRAHS*N-C(Sx)-FS-Z (SEQ ID NO: 3446), X-KKKKTKKRPQRAHSD-C(Sx)-FS*-Z (SEQ ID NO: 3447), X-KKKKTKKRPQRAHSN-C(Sx)-FS*-Z (SEQ ID NO: 3448), X-KKKKTKKRPQRATS*D-C(Sx)-FA-Z (SEQ ID NO: 3449), X-KKKKTKKRPQRATS*D-C(Sx)-FS-Z (SEQ ID NO: 3450), X-KKKKTKKRPQRATS*N-C(Sx)-FA-Z (SEQ ID NO: 3451), X-KKKKTKKRPQRATS*N-C(Sx)-FS-Z (SEQ ID NO: 3452), X-KKKKTKKRPQRATSD-C(Sx)-FS*-Z (SEQ ID NO: 3453), X-KKKKTKKRPQRATSN-C(Sx)-FS*-Z (SEQ ID NO: 3454), X-KKKKVKKRPQRA[hE]S*D-C(Sx)-FS-Z (SEQ ID NO: 3455), X-KKKKVKKRPQRA[hE]SD-C(Sx)-FS*-Z (SEQ ID NO: 3456), X-KKKKVKKRPQRADS*D-C(Sx)-FS-Z (SEQ ID NO: 3458), X-KKKKVKKRPQRADS*N-C(Sx)-FA-Z (SEQ ID NO: 3459), X-KKKKVKKRPQRADS*N-C(Sx)-FS-Z (SEQ ID NO: 3460), X-KKKKVKKRPQRADSD-C(Sx)-FS*-Z (SEQ ID NO: 3461), and X-KKKKVKKRPQRADSN-C(Sx)-FS*-Z (SEQ ID NO: 3462); or
a compound selected from the group consisting of: X-EEPIY*I-C(Sx)-VP-Z (SEQ ID NO: 30), X-GAEEPIY*I-C(Sx)-VPAKKKG-Z (SEQ ID NO: 42), X-EEEIY*F-C(Sx)-dP-(2-Nal)-G-Z (SEQ ID NO: 16), X-EEEIY*F-C(Sx)-Z (SEQ ID NO: 17), X-EEIY*F-C(Sx)-Z (SEQ ID NO: 18), X-EIY*F-C(Sx)-Z (SEQ ID NO: 19), X-IY*F-C(Sx)-Z (SEQ ID NO: 20), X-Y*F-C(Sx)-Z (SEQ ID NO: 21), X-EEEEY*I-C(Sx)-dP-(2-Nal)-G-Z (SEQ ID NO: 22), X-EEEEY*I-C(Sx)-VG-Z (SEQ ID NO: 23), X-DPQEY*I-C(Sx)-LP-Z (SEQ ID NO: 24), X-EDEDY*E-C(Sx)-VG-Z (SEQ ID NO: 25), X-EAEAIY*A-C(Sx)-dP-(2-Nal)-G-Z (SEQ ID NO: 26), X-EAEAIY*A-C(Sx)-PF-Z (SEQ ID NO: 27), X-EAEAIY*A-C(Sx)-P-Z (SEQ ID NO: 28), X-EAEAIY*A-C(Sx)-Z (SEQ ID NO: 29), X-DEQIY*W-C(Sx)-IA-Z (SEQ ID NO: 31), X-KKGEAIY*A-C(Sx)-dP-(2-Nal)-G-Z (SEQ ID NO: 32), X-KKGEAIY*A-C(Sx)-PFAKKK-Z (SEQ ID NO: 33), X-KKGE-C(Sx)-IY*AAPFAKKK-Z (SEQ ID NO: 34), X-E-C(Sx)-IY*AAPF-Z (SEQ ID NO: 35), X-E-C(Sx)-IY*A-Z (SEQ ID NO: 36), X-E-C(Sx)-IY*-Z (SEQ ID NO: 37), X-C(Sx)-IY*-Z (SEQ ID NO: 38), X-KKGEAIY*A-C(Sx)-PF-Z (SEQ ID NO: 39), X-PE-C(Sx)-IY*ATPG-Z (SEQ ID NO: 40), and X-PEVIY*A-C(Sx)-PG-Z (SEQ ID NO: 41); or
a compound selected from the group consisting of: X-C(Sx)-KT*PKKAKKL-Z (SEQ ID NO: 212), X-C(Sx)-QS*PKKG-Z (SEQ ID NO: 207), X-KKKVLTQMGSPSIR-C(Sx)-SS*VS-Z (SEQ ID NO: 139), X-KKKVLTQMGSPSI-C(Sx)-SS*[pS]VS-Z (SEQ ID NO: 140), X-SGRSRRKS*P-C(Sx)-PSPHP-Z (SEQ ID NO: 141), X-SGRSR-C(Sx)-KS*PRPSPHP-Z (SEQ ID NO: 142), X-SGRSR-C(Sx)-KS*VRRSPHP-Z (SEQ ID NO: 143), X-KKLNRTLS*F-C(Sx)-EPG-Z (SEQ ID NO: 144), X-KKRPQRATS*N-C(Sx)-FAM-Z (SEQ ID NO: 145), X-RGRSRRDS*F-C(Sx)-VSPHY-Z (SEQ ID NO: 146), X-RKRSRRKS*F-C(Sx)-VLSSL-Z (SEQ ID NO: 147), X-AKRRRLSSLRASTSK-C(Sx)-ES*SQK-Z (SEQ ID NO: 148), X-AKRRRLSSLRASTSKSES*S-C(Sx)-K-Z (SEQ ID NO: 149), X-KMQPPR-C(Sx)-RS*SIMSIT-Z (SEQ ID NO: 150), X-KMQPPRSRS*S-C(Sx)-MSIT-Z (SEQ ID NO: 151), X-SGRSRPLS*P-C(Sx)-PSPHY-Z (SEQ ID NO: 152), X-LIDS*M-C(Sx)-NSFVG-Z (SEQ ID NO: 153), X-LIDSM-C(Sx)-NS*FVG-Z (SEQ ID NO: 154), X-PKRSR-C(Sx)-SS*YPNGHRD-Z (SEQ ID NO: 155), X-PKRSRSSS*V-C(Sx)-PSHSY-Z (SEQ ID NO: 156), X-SGLEDDDY*V-C(Sx)-PGGHW-Z (SEQ ID NO: 157), X-ALKLVRYPS*F-C(Sx)-ITAKKK-Z (SEQ ID NO: 158), X-AMRLERQDS*I-C(Sx)-YPKKK-Z (SEQ ID NO: 159), X-KKKVSRSGLYRSPS*M-C(Sx)-ENLNRPR-Z (SEQ ID NO: 160), X-KKVSRSGLYRSPS*M-C(Sx)-E-Z (SEQ ID NO: 161), X-KKVSRSGLYR-C(Sx)-PS*MPE-Z (SEQ ID NO: 162), X-GRPRTSS*F-C(Sx)-EPG-Z (SEQ ID NO: 163), X-LRREILS*R-C(Sx)-PSYRK-Z (SEQ ID NO: 164), X-LRREILSR-C(Sx)-PS*YRK-Z (SEQ ID NO: 165), X-LRRE-C(Sx)-LS*RRPSYRK-Z (SEQ ID NO: 166), X-LRREILSRRPS*Y-C(Sx)-K-Z (SEQ ID NO: 167), X-FQREGFGRQS*M-C(Sx)-EKR-Z (SEQ ID NO: 168), X-FQREGFG-C(Sx)-QS*MSEKR-Z (SEQ ID NO: 169), X-RS*R-C(Sx)-RSRSRSRSRSR-Z (SEQ ID NO: 170), X-RSR-C(Sx)-RS*RSRSRSRSR-Z (SEQ ID NO: 171), X-RSRSRS*R-C(Sx)-RSRSRSR-Z (SEQ ID NO: 172), X-RSRSRSR-C(Sx)-RS*RSRSR-Z (SEQ ID NO: 173), X-RSRSRSRSRS*R-C(Sx)-RSR-Z (SEQ ID NO: 174), X-RSRSRSRSRSR-C(Sx)-RS*R-Z (SEQ ID NO: 175), X-ILLSELS*R-C(Sx)-RIR-Z (SEQ ID NO: 176), X-ILLSESS*R-C(Sx)-RIR-Z (SEQ ID NO: 177), X-ILLR-C(Sx)-SS*RRIRR-Z (SEQ ID NO: 178), X-ILLS-C(Sx)-SS*RRRIRSGNKLGRIGRN-Z (SEQ ID NO: 179), X-ILLS-C(Sx)-SS*RRRIRSGNKLGRIGRN-Z (SEQ ID NO: 179), X-GKRGD-C(Sx)-KS*VSRSSSS-Z (SEQ ID NO: 180), X-SGRSR-C(Sx)-DS*PRPGTHK-Z (SEQ ID NO: 181), X-SKRSR-C(Sx)-KS*PRRSLSY-Z (SEQ ID NO: 182), X-R-C(Sx)-LS*FRRR-Z (SEQ ID NO: 183), X-PLSRT*L-C(Sx)-VAAKK-Z (SEQ ID NO: 184), X-KKKKK-C(Sx)-FS*FKKSFKLSGFSFKKNKK-Z (SEQ ID NO: 185), X-KKKKKRFS*F-C(Sx)-KSFKLSGFSFKKNKK-Z (SEQ ID NO: 186), X-KKKKKRFSF-C(Sx)-KS*FKLSGFSFKKNKK-Z (SEQ ID NO: 187), X-KKKKKRFSFKKS*F-C(Sx)-LSGFSFKKNKK-Z (SEQ ID NO: 188), X-KKKKKRFSFKKSF-C(Sx)-LS*GFSFKKNKK-Z (SEQ ID NO: 189), X-KKKKKRFSFKKSFKLSGFS*F-C(Sx)-KNKK-Z (SEQ ID NO: 190), X-KGTLVQTKGTGASGS*F-C(Sx)-LNKK-Z (SEQ ID NO: 191), X-RRR-C(Sx)-SS*LRA-Z (SEQ ID NO: 192), X-RR-C(Sx)-SS*LRA-Z (SEQ ID NO: 193), X-RRLSS*L-C(Sx)-A-Z (SEQ ID NO: 194), X-RT-C(Sx)-RS*GSVYEPLKI-Z (SEQ ID NO: 195), X-RFAVRDMRQT*V-C(Sx)-VGVIKAVDKK-Z (SEQ ID NO: 196), X-AAKI-C(Sx)-AS*FRGHMARKK-Z (SEQ ID NO: 197), X-RR-C(Sx)-RT*GRGRRGIFR-Z (SEQ ID NO: 198), X-QK-C(Sx)-PS*QRSKYL-Z (SEQ ID NO: 199), X-STASQDVANRFARKGS*L-C(Sx)-QKNV-Z (SEQ ID NO: 200), X-MFAVRDRRQT*V-C(Sx)-KGVIKAVDAV-Z (SEQ ID NO: 201), X-RLGRDK-C(Sx)-KT*LRQIRQ-Z (SEQ ID NO: 202), X-RLGRDKYKT*L-C(Sx)-QIRQ-Z (SEQ ID NO: 203), X-ERMRPRKRQGS*V-C(Sx)RRV-Z (SEQ ID NO: 204), X-HAT*P-C(Sx)-KKKRK-Z (SEQ ID NO: 205), X-GGG-C(Sx)-AT*PKKAKKL-Z (SEQ ID NO: 206), X-RRRFRPAS*P-C(Sx)-RGPPK-Z (SEQ ID NO: 208), X-RRRFRPAS*P-C(Sx)-RGPPK-Z (SEQ ID NO: 208), X-IPTS*P-C(Sx)-TTTYFFF-Z (SEQ ID NO: 209), X-I-C(Sx)-TS*PITTTYFFF-Z (SEQ ID NO: 210), X-IPTS*P-C(Sx)-TTTYFFFKKK-Z (SEQ ID NO: 211), and X-GGG-C(Sx)-AT*PKKAKKL-Z (SEQ ID NO: 206); or
a compound selected from the group consisting of: X-DANPLMA-C(Sx)-GT*LTRRHQNGRF-Z (SEQ ID NO: 1200), X-DANPLMA-C(Sx)-GT*LTRRHANGRF-Z (SEQ ID NO: 1534), X-DANPLMA-C(Sx)-GT*LTRRHDNGRF-Z (SEQ ID NO: 1535), X-DANPLMA-C(Sx)-GT*LTRRHENGRF-Z (SEQ ID NO: 1536), X-DANPLMA-C(Sx)-GT*LTRRHFNGRF-Z (SEQ ID NO: 1537), X-DANPLMA-C(Sx)-GT*LTRRHGNGRF-Z (SEQ ID NO: 1538), X-DANPLMA-C(Sx)-GT*LTRRHHNGRF-Z (SEQ ID NO: 1539), X-DANPLMA-C(Sx)-GT*LTRRHINGRF-Z (SEQ ID NO: 1540), X-DANPLMA-C(Sx)-GT*LTRRHKNGRF-Z (SEQ ID NO: 1541), X-DANPLMA-C(Sx)-GT*LTRRHLNGRF-Z (SEQ ID NO: 1542), X-DANPLMA-C(Sx)-GT*LTRRHNNGRF-Z (SEQ ID NO: 1543), X-DANPLMA-C(Sx)-GT*LTRRHPNGRF-Z (SEQ ID NO: 1544), X-DANPLMA-C(Sx)-GT*LTRRHQ[Nle]GRF-Z (SEQ ID NO: 1545), X-DANPLMA-C(Sx)-GT*LTRRHQAGRF-Z (SEQ ID NO: 1546), X-DANPLMA-C(Sx)-GT*LTRRHQDGRF-Z (SEQ ID NO: 1547), X-DANPLMA-C(Sx)-GT*LTRRHQEGRF-Z (SEQ ID NO: 1548), X-DANPLMA-C(Sx)-GT*LTRRHQFGRF-Z (SEQ ID NO: 1549), X-DANPLMA-C(Sx)-GT*LTRRHQGGRF-Z (SEQ ID NO: 1550), X-DANPLMA-C(Sx)-GT*LTRRHQHGRF-Z (SEQ ID NO: 1551), X-DANPLMA-C(Sx)-GT*LTRRHQIGRF-Z (SEQ ID NO: 1552), X-DANPLMA-C(Sx)-GT*LTRRHQKGRF-Z (SEQ ID NO: 1553), X-DANPLMA-C(Sx)-GT*LTRRHQLGRF-Z (SEQ ID NO: 1554), X-DANPLMA-C(Sx)-GT*LTRRHQN[Nle]RF-Z (SEQ ID NO: 1555), X-DANPLMA-C(Sx)-GT*LTRRHQNARF-Z (SEQ ID NO: 1556), X-DANPLMA-C(Sx)-GT*LTRRHQNDRF-Z (SEQ ID NO: 1557), X-DANPLMA-C(Sx)-GT*LTRRHQNERF-Z (SEQ ID NO: 1558), X-DANPLMA-C(Sx)-GT*LTRRHQNFRF-Z (SEQ ID NO: 1559), X-DANPLMA-C(Sx)-GT*LTRRHQNG[Nle]F-Z (SEQ ID NO: 1560), X-DANPLMA-C(Sx)-GT*LTRRHQNGAF-Z (SEQ ID NO: 1561), X-DANPLMA-C(Sx)-GT*LTRRHQNGDF-Z (SEQ ID NO: 1562), X-DANPLMA-C(Sx)-GT*LTRRHQNGEF-Z (SEQ ID NO: 1563), X-DANPLMA-C(Sx)-GT*LTRRHQNGFF-Z (SEQ ID NO: 1564), X-DANPLMA-C(Sx)-GT*LTRRHQNGGF-Z (SEQ ID NO: 1565), X-DANPLMA-C(Sx)-GT*LTRRHQNGHF-Z (SEQ ID NO: 1566), X-DANPLMA-C(Sx)-GT*LTRRHQNGIF-Z (SEQ ID NO: 1567), X-DANPLMA-C(Sx)-GT*LTRRHQNGKF-Z (SEQ ID NO: 1568), X-DANPLMA-C(Sx)-GT*LTRRHQNGLF-Z (SEQ ID NO: 1569), X-DANPLMA-C(Sx)-GT*LTRRHQNGNF-Z (SEQ ID NO: 1570), X-DANPLMA-C(Sx)-GT*LTRRHQNGPF-Z (SEQ ID NO: 1571), X-DANPLMA-C(Sx)-GT*LTRRHQNGQF-Z (SEQ ID NO: 1572), X-DANPLMA-C(Sx)-GT*LTRRHQNGR[Nle]-Z (SEQ ID NO: 1573), X-DANPLMA-C(Sx)-GT*LTRRHQNGRA-Z (SEQ ID NO: 1574), X-DANPLMA-C(Sx)-GT*LTRRHQNGRD-Z (SEQ ID NO: 1575), X-DANPLMA-C(Sx)-GT*LTRRHQNGRE-Z (SEQ ID NO: 1576), X-DANPLMA-C(Sx)-GT*LTRRHQNGRG-Z (SEQ ID NO: 1577), X-DANPLMA-C(Sx)-GT*LTRRHQNGRH-Z (SEQ ID NO: 1578), X-DANPLMA-C(Sx)-GT*LTRRHQNGRI-Z (SEQ ID NO: 1579), X-DANPLMA-C(Sx)-GT*LTRRHQNGRK-Z (SEQ ID NO: 1580), X-DANPLMA-C(Sx)-GT*LTRRHQNGRL-Z (SEQ ID NO: 1581), X-DANPLMA-C(Sx)-GT*LTRRHQNGRN-Z (SEQ ID NO: 1582), and X-DANPLMA-C(Sx)-GT*LTRRHQNGRP-Z (SEQ ID NO: 1583); or
a compound selected from the group consisting of: X-C(Sx)-FS*LRRKAK-Z (SEQ ID NO: 220), X-HMRSAMS*G-C(Sx)-HLVKRR-Z (SEQ ID NO: 213), X-HMRS-C(Sx)-MS*GLHLVKRR-Z (SEQ ID NO: 214), X-AMARAAS*A-C(Sx)-ALARRR-Z (SEQ ID NO: 215), X-KKKALSRQFS*V-C(Sx)-Z (SEQ ID NO: 216), X-GRTGRRNS*I-C(Sx)-Z (SEQ ID NO: 217), X-FLAKRRRLSS*L-C(Sx)-A-Z (SEQ ID NO: 218), X-KKRNRTLT*V-C(Sx)-Z (SEQ ID NO: 219), X-KEIYNT*I-C(Sx)-Z (SEQ ID NO: 221), X-RKIS*A-C(Sx)-EFDRPLR-Z (SEQ ID NO: 222), X-R-C(Sx)-IS*ASEFDRPLR-Z (SEQ ID NO: 223), X-RKIS*A-C(Sx)-EFDRPLR-Z (SEQ ID NO: 222), X-RKRS*R-C(Sx)-E-Z (SEQ ID NO: 224), X-RARTLS*F-C(Sx)-EPG-Z (SEQ ID NO: 225), X-KRRE-C(Sx)-LS*RRP[pS]YR-Z (SEQ ID NO: 226), X-RRAAEE-C(Sx)-DS*RAG[pS]PQL-Z (SEQ ID NO: 227), X-RYR-C(Sx)-PT*GMYY-Z (SEQ ID NO: 228), X-RYRHPT*R-C(Sx)-YY-Z (SEQ ID NO: 229), X-KPDRKKRY*TV-C(Sx)-GNPY-Z (SEQ ID NO: 230), X-RRRLS*F-C(Sx)-EPG-Z (SEQ ID NO: 231), X-PL-C(Sx)-RT*LSVAGLPGKK-Z (SEQ ID NO: 232), X-KKLNRT*L-C(Sx)-VA-Z (SEQ ID NO: 233), X-KKALRRQET*V-C(Sx)-AL-Z (SEQ ID NO: 234), X-LSNLYHQGKFLQT*F-C(Sx)-GSPLYRRR-Z (SEQ ID NO: 235), X-RISDELMDAT*F-C(Sx)-DQEAK-Z (SEQ ID NO: 236), X-DELMEFS*F-C(Sx)-DQEAKV-Z (SEQ ID NO: 237), X-SGEDT*L-C(Sx)-DSDDED-Z (SEQ ID NO: 238), X-GRHD[pS]GLDS*M-C(Sx)-Z (SEQ ID NO: 239), X-KRRRALS[pS]VAS*L-C(Sx)-Z (SEQ ID NO: 240), X-RRKDLHDDEEDEAMS*I-C(Sx)-A-Z (SEQ ID NO: 241), X-RRA-C(Sx)-DS*DDDDD-Z (SEQ ID NO: 242), X-LGKEF-C(Sx)-RS*YRLRYSRDGRR-Z (SEQ ID NO: 243), X-LGKEFSRS*Y-C(Sx)LRYSRDGRR-Z (SEQ ID NO: 244), X-GRPRTSS*F-C(Sx)-EG-Z (SEQ ID NO: 245), X-PRTSS*F-C(Sx)-E-Z (SEQ ID NO: 246), X-KRRRLAS*L-C(Sx)-A-Z (SEQ ID NO: 247), X-KKRNRTLS*V-C(Sx)-Z (SEQ ID NO: 248), X-RKKFGES-C(Sx)-KT*KTKEFL-Z (SEQ ID NO: 249), and X-RKKFGESEKT*K-C(Sx)-KEFL-Z (SEQ ID NO: 250); or
a compound selected from the group consisting of: X-RLPWWR-C(Sx)-YT*WVRARQVNTKQR-Z (SEQ ID NO: 4513), X-RLPWWR-C(Sx)-YT*WQVERQGNTKQR-Z (SEQ ID NO: 4482), X-RLPWWR-C(Sx)-YT*WQVERQVNTKQR-Z (SEQ ID NO: 4483), X-RLPWWR-C(Sx)-YT*WRRARDGNTKQR-Z (SEQ ID NO: 4484), X-RLPWWR-C(Sx)-YT*WRRARDVNTKQR-Z (SEQ ID NO: 4485), X-RLPWWR-C(Sx)-YT*WRRAREGNTKQR-Z (SEQ ID NO: 4486), X-RLPWWR-C(Sx)-YT*WRRAREVNTKQR-Z (SEQ ID NO: 4487), X-RLPWWR-C(Sx)-YT*WRRARQGNTKQR-Z (SEQ ID NO: 4488), X-RLPWWR-C(Sx)-YT*WRRARQVNTKQR-Z (SEQ ID NO: 4489), X-RLPWWR-C(Sx)-YT*WRRERDGNTKQR-Z (SEQ ID NO: 4490), X-RLPWWR-C(Sx)-YT*WRRERDVNTKQR-Z (SEQ ID NO: 4491), X-RLPWWR-C(Sx)-YT*WRREREGNTKQR-Z (SEQ ID NO: 4492), X-RLPWWR-C(Sx)-YT*WRREREVNTKQR-Z (SEQ ID NO: 4493), X-RLPWWR-C(Sx)-YT*WRRERQGNTKQR-Z (SEQ ID NO: 4494), X-RLPWWR-C(Sx)-YT*WRRERQVNTKQR-Z (SEQ ID NO: 4495), X-RLPWWR-C(Sx)-YT*WRVARDGNTKQR-Z (SEQ ID NO: 4496), X-RLPWWR-C(Sx)-YT*WRVARDVNTKQR-Z (SEQ ID NO: 4497), X-RLPWWR-C(Sx)-YT*WRVAREGNTKQR-Z (SEQ ID NO: 4498), X-RLPWWR-C(Sx)-YT*WRVAREVNTKQR-Z (SEQ ID NO: 4499), X-RLPWWR-C(Sx)-YT*WRVARQGNTKQR-Z (SEQ ID NO: 4500), X-RLPWWR-C(Sx)-YT*WRVARQVNTKQR-Z (SEQ ID NO: 4501), X-RLPWWR-C(Sx)-YT*WRVERDGNTKQR-Z (SEQ ID NO: 4502), X-RLPWWR-C(Sx)-YT*WRVERDVNTKQR-Z (SEQ ID NO: 4503), X-RLPWWR-C(Sx)-YT*WRVEREGNTKQR-Z (SEQ ID NO: 4504), X-RLPWWR-C(Sx)-YT*WRVEREVNTKQR-Z (SEQ ID NO: 4505), X-RLPWWR-C(Sx)-YT*WRVERQGNTKQR-Z (SEQ ID NO: 4506), X-RLPWWR-C(Sx)-YT*WRVERQVNTKQR-Z (SEQ ID NO: 4507), X-RLPWWR-C(Sx)-YT*WVRARDGNTKQR-Z (SEQ ID NO: 4508), X-RLPWWR-C(Sx)-YT*WVRARDVNTKQR-Z (SEQ ID NO: 4509), X-RLPWWR-C(Sx)-YT*WVRAREGNTKQR-Z (SEQ ID NO: 4510), X-RLPWWR-C(Sx)-YT*WVRAREVNTKQR-Z (SEQ ID NO: 4511), X-RLPWWR-C(Sx)-YT*WVRARQGNTKQR-Z (SEQ ID NO: 4512), X-RLPWWR-C(Sx)-YT*WVRERDGNTKQR-Z (SEQ ID NO: 4514), X-RLPWWR-C(Sx)-YT*WVRERDVNTKQR-Z (SEQ ID NO: 4515), X-RLPWWR-C(Sx)-YT*WVREREGNTKQR-Z (SEQ ID NO: 4516), X-RLPWWR-C(Sx)-YT*WVREREVNTKQR-Z (SEQ ID NO: 4517), X-RLPWWR-C(Sx)-YT*WVRERQGNTKQR-Z (SEQ ID NO: 4518), X-RLPWWR-C(Sx)-YT*WVRERQVNTKQR-Z (SEQ ID NO: 4519), X-RLPWWR-C(Sx)-YT*WVVARDGNTKQR-Z (SEQ ID NO: 4520), X-RLPWWR-C(Sx)-YT*WVVARDVNTKQR-Z (SEQ ID NO: 4521), X-RLPWWR-C(Sx)-YT*WVVAREGNTKQR-Z (SEQ ID NO: 4522), X-RLPWWR-C(Sx)-YT*WVVAREVNTKQR-Z (SEQ ID NO: 4523), X-RLPWWR-C(Sx)-YT*WVVARQGNTKQR-Z (SEQ ID NO: 4524), X-RLPWWR-C(Sx)-YT*WVVARQVNTKQR-Z (SEQ ID NO: 4525), X-RLPWWR-C(Sx)-YT*WVVERDGNTKQR-Z (SEQ ID NO: 4526), X-RLPWWR-C(Sx)-YT*WVVERDVNTKQR-Z (SEQ ID NO: 4527), X-RLPWWR-C(Sx)-YT*WVVEREGNTKQR-Z (SEQ ID NO: 4528), X-RLPWWR-C(Sx)-YT*WVVEREVNTKQR-Z (SEQ ID NO: 4529), X-RLPWWR-C(Sx)-YT*WVVERQGNTKQR-Z (SEQ ID NO: 4530), and X-RLPWWR-C(Sx)-YT*WVVERQVNTKQR-Z (SEQ ID NO: 4531); or
a compound selected from the group consisting of: X-LKP-C(Sx)-AS*FKKFA-Z (SEQ ID NO: 5485), X-[Nle]KR-C(Sx)-AS*FKKFA-Z (SEQ ID NO: 5457); X-AKR-C(Sx)-AS*FKKFA-Z (SEQ ID NO: 5458); X-DKR-C(Sx)-AS*FKKFA-Z (SEQ ID NO: 5459); X-EKR-C(Sx)-AS*FKKFA-Z (SEQ ID NO: 5460); X-FKR-C(Sx)-AS*FKKFA-Z (SEQ ID NO: 5461); X-GKR-C(Sx)-AS*FKKFA-Z (SEQ ID NO: 5462); X-HKR-C(Sx)-AS*FKKFA-Z (SEQ ID NO: 5463); X-IKR-C(Sx)-AS*FKKFA-Z (SEQ ID NO: 5464); X-KKR-C(Sx)-AS*FKKFA-Z (SEQ ID NO: 5465); X-L[Nle]R-C(Sx)-AS*FKKFA-Z (SEQ ID NO: 5466); X-LAR-C(Sx)-AS*FKKFA-Z (SEQ ID NO: 5467); X-LDR-C(Sx)-AS*FKKFA-Z (SEQ ID NO: 5468); X-LER-C(Sx)-AS*FKKFA-Z (SEQ ID NO: 5469); X-LFR-C(Sx)-AS*FKKFA-Z (SEQ ID NO: 5470); X-LGR-C(Sx)-AS*FKKFA-Z (SEQ ID NO: 5471); X-LHR-C(Sx)-AS*FKKFA-Z (SEQ ID NO: 5472); X-LIR-C(Sx)-AS*FKKFA-Z (SEQ ID NO: 5473); X-LK[Nle]-C(Sx)-AS*FKKFA-Z (SEQ ID NO: 5474); X-LKA-C(Sx)-AS*FKKFA-Z (SEQ ID NO: 5475); X-LKD-C(Sx)-AS*FKKFA-Z (SEQ ID NO: 5476); X-LKE-C(Sx)-AS*FKKFA-Z (SEQ ID NO: 5477); X-LKF-C(Sx)-AS*FKKFA-Z (SEQ ID NO: 5478); X-LKG-C(Sx)-AS*FKKFA-Z (SEQ ID NO: 5479); X-LKH-C(Sx)-AS*FKKFA-Z (SEQ ID NO: 5480); X-LKI-C(Sx)-AS*FKKFA-Z (SEQ ID NO: 5481); X-LKK-C(Sx)-AS*FKKFA-Z (SEQ ID NO: 5482); X-LKL-C(Sx)-AS*FKKFA-Z (SEQ ID NO: 5483); X-LKN-C(Sx)-AS*FKKFA-Z (SEQ ID NO: 5484); X-LKQ-C(Sx)-AS*FKKFA-Z (SEQ ID NO: 5486); or
a compound selected from the group consisting of: X-KKKKVKKRPQRAHS*D-C(Sx)-FS-Z (SEQ ID NO: 3470), X-KKKKVKKRPQRAES*D-C(Sx)-FA-Z (SEQ ID NO: 3463), X-KKKKVKKRPQRAES*D-C(Sx)-FS-Z (SEQ ID NO: 3464), X-KKKKVKKRPQRAES*N-C(Sx)-FA-Z (SEQ ID NO: 3465), X-KKKKVKKRPQRAES*N-C(Sx)-FS-Z (SEQ ID NO: 3466), X-KKKKVKKRPQRAESD-C(Sx)-FS*-Z (SEQ ID NO: 3467), X-KKKKVKKRPQRAESN-C(Sx)-FS*-Z (SEQ ID NO: 3468), X-KKKKVKKRPQRAHS*D-C(Sx)-FA-Z (SEQ ID NO: 3469), X-KKKKVKKRPQRAHS*N-C(Sx)-FA-Z (SEQ ID NO: 3471), X-KKKKVKKRPQRAHS*N-C(Sx)-FS-Z (SEQ ID NO: 3472), X-KKKKVKKRPQRAHSD-C(Sx)-FS*-Z (SEQ ID NO: 3473), X-KKKKVKKRPQRAHSN-C(Sx)-FS*-Z (SEQ ID NO: 3474), X-KKKKVKKRPQRATS*D-C(Sx)-FA-Z (SEQ ID NO: 3475), X-KKKKVKKRPQRATS*D-C(Sx)-FS-Z (SEQ ID NO: 3476), X-KKKKVKKRPQRATS*N-C(Sx)-FA-Z (SEQ ID NO: 3477), X-KKKKVKKRPQRATS*N-C(Sx)-FS-Z (SEQ ID NO: 3478), X-KKKKVKKRPQRATSD-C(Sx)-FS*-Z (SEQ ID NO: 3479), X-KKKKVKKRPQRATSN-C(Sx)-FS*-Z (SEQ ID NO: 3480), X-KKKLAPNPSFS*P-C(Sx)-PGFTP-Z (SEQ ID NO: 1102), X-KKKLIDS[Nle]ANS*F-C(Sx)-GTRSY-Z (SEQ ID NO: 3481), X-KKKLIDS[Nle]ANSF-C(Sx)-GT*RSY-Z (SEQ ID NO: 3482), X-KKKLPPVFSGT*P-C(Sx)-GSGAG-Z (SEQ ID NO: 3483), X-KKKLPPVFSGTP-C(Sx)-GS*GAG-Z (SEQ ID NO: 3484), X-KKKLSNSQGQS*P-C(Sx)-VPFPA-Z (SEQ ID NO: 3485), X-KKKLTDPRLLS*P-C(Sx)-QPALQ-Z (SEQ ID NO: 3486), X-KKKNVH[Nle]VSTT*L-C(Sx)-VDSR-Z (SEQ ID NO: 3487), X-KKKPLSPFPVS*P-C(Sx)-AGPGS-Z (SEQ ID NO: 3488), X-KKKPQPLRS*P-C(Sx)-LDNPT-Z (SEQ ID NO: 3489), X-KKKPQRAT*S-C(Sx)-VFAMF-Z (SEQ ID NO: 3490), X-KKKPSAPA-C(Sx)-ST*PGIRDSA-Z (SEQ ID NO: 3491), X-KKKPSAPALST*P-C(Sx)-IRDSA-Z (SEQ ID NO: 3492), X-KKKPSAPALST*PG-C(Sx)-RDSA-Z (SEQ ID NO: 3493), X-KKKQ[Nle]AGTPIT*P-C(Sx)-KDGFT-Z (SEQ ID NO: 3494), X-KKKQAATGFGS*P-C(Sx)-QYSAD-Z (SEQ ID NO: 3495), X-KKKQGPAPVGT*P-C(Sx)-FNRQH-Z (SEQ ID NO: 3496), X-KKKQLSKWPGS*P-C(Sx)-SRSSD-Z (SEQ ID NO: 3497), X-KKKQNRSGAMS*P-C(Sx)-SWNSD-Z (SEQ ID NO: 3498), X-KKKQS[Nle]VVPQT*P-C(Sx)-HTARV-Z (SEQ ID NO: 3499), X-KKKQS[Nle]VVPQTP-C(Sx)-HT*ARV-Z (SEQ ID NO: 3500), X-KKKQSAQS-C(Sx)-AT*PVVSVAT-Z (SEQ ID NO: 3501), X-KKKQSAQSLAT*P-C(Sx)-VSVAT-Z (SEQ ID NO: 3502), X-KKKQSAQSLATP-C(Sx)-VS*VAT-Z (SEQ ID NO: 3503), X-KKKRPASVNGS*P-C(Sx)-ATSES-Z (SEQ ID NO: 3504), X-KKKRPASVNGSP-C(Sx)-AT*SES-Z (SEQ ID NO: 3505), X-KKKS[Nle]DGLFGT*I-C(Sx)-YLP-Z (SEQ ID NO: 3506), X-KKKSALQG-C(Sx)-NS*PG[Nle]LSLG-Z (SEQ ID NO: 3507), X-KKKSALQGFNS*P-C(Sx)-[Nle]LSLG-Z (SEQ ID NO: 3508), X-KKKSASGSAFS*P-C(Sx)-PGSAA-Z (SEQ ID NO: 3509), X-KKKSAVNGTSS*A-C(Sx)-TNLEA-Z (SEQ ID NO: 3510), and X-KKKSGYS*S-C(Sx)-GSPGTPGSR-Z (SEQ ID NO: 3511); or
a compound selected from the group consisting of: X-SR-C(Sx)-SS*PHQ[pS]EDEEE-Z (SEQ ID NO: 4741), X-S*R-C(Sx)-LSVSSLPGLED-Z (SEQ ID NO: 4696), X-S*R-C(Sx)-SSPHQ[pS]EDEEE-Z (SEQ ID NO: 4697), X-SAKS*R-C(Sx)-QTAPVP[Nle]PD-Z (SEQ ID NO: 4698), X-SAKSR-C(Sx)-QT*APVP[Nle]PD-Z (SEQ ID NO: 4699), X-SAKSRLQT*A-C(Sx)-VP[Nle]PD-Z (SEQ ID NO: 4700), X-SANLLS*P-C(Sx)-PA-Z (SEQ ID NO: 4701), X-SEGLS*M-C(Sx)-NYIGLINRIKK-Z (SEQ ID NO: 4702), X-SFITPPTT*P-C(Sx)-LRRHT-Z (SEQ ID NO: 1092), X-SGDED-C(Sx)-SS*IADMDFSAL-Z (SEQ ID NO: 4703), X-SGDEDFSS*I-C(Sx)-DMDFSALLSQ-Z (SEQ ID NO: 4704), X-SGDY[Nle]P[Nle]S*P-C(Sx)-SVSAP-Z (SEQ ID NO: 4705), X-SGLS*R-C(Sx)-DSPEPFGHY-Z (SEQ ID NO: 4706), X-SGLSR-C(Sx)-DS*PEPFGHY-Z (SEQ ID NO: 4707), X-SGLSRRDS*P-C(Sx)-PFGHY-Z (SEQ ID NO: 4708), X-SGQL-C(Sx)-DS*[Nle]ANSFV-Z (SEQ ID NO: 4709), X-SGQLIDS*[Nle]-C(Sx)-NSFV-Z (SEQ ID NO: 4710), X-SGQLIDS[Nle]ANS*F-C(Sx)-G-Z (SEQ ID NO: 4711), X-SGQLIDS[Nle]-C(Sx)-NS*FV-Z (SEQ ID NO: 4712), X-SGRPR-C(Sx)-TS*FAESSKP-Z (SEQ ID NO: 4713), X-SGRPRTTS*F-C(Sx)-ESSKP-Z (SEQ ID NO: 4714), X-SGVEV-C(Sx)-VT*PTRTEII-Z (SEQ ID NO: 1061), X-SGVEVRVT*P-C(Sx)-RTEII-Z (SEQ ID NO: 1060), X-SGVEVRVTP-C(Sx)-RT*EII-Z (SEQ ID NO: 4715), X-SIKS*E-C(Sx)-ISPPRDR[Nle]T-Z (SEQ ID NO: 4716), X-SIKSE-C(Sx)-IS*PPRDR[Nle]T-Z (SEQ ID NO: 4717), X-SIKSEPIS*P-C(Sx)-RDR[Nle]T-Z (SEQ ID NO: 4718), X-SIMQQ-C(Sx)-DS*PHVVKYYKKK-Z (SEQ ID NO: 4719), X-SKS*S-C(Sx)-NGTSGDREDK-Z (SEQ ID NO: 4720), X-SLD-C(Sx)-SS*LSLSLSSANSLYDD-Z (SEQ ID NO: 4721), X-SLDSSSLS*L-C(Sx)-LSSANSLYDD-Z (SEQ ID NO: 4722), X-SLDSSSLSL-C(Sx)-LS*SANSLYDD-Z (SEQ ID NO: 4723), X-SNGRR-C(Sx)-RS*PTQSFRF-Z (SEQ ID NO: 1037), X-SNGRRKRS*P-C(Sx)-QSFRF-Z (SEQ ID NO: 1036), X-SNGRRKRSP-C(Sx)-QS*FRF-Z (SEQ ID NO: 4724), X-SNSLKKSS*A-C(Sx)-LKKIL-Z (SEQ ID NO: 1180), X-SNT*GQ-C(Sx)-ISPG[Nle]KRRI-Z (SEQ ID NO: 4725), X-SNTGQAIS*P-C(Sx)-[Nle]KRRI-Z (SEQ ID NO: 4726), X-SNTGQAIS*PG-C(Sx)-KRRI-Z (SEQ ID NO: 4727), X-SNTGQ-C(Sx)-IS*PG[Nle]KRRI-Z (SEQ ID NO: 4728), X-SPAR-C(Sx)-SS*YSEANEP-Z (SEQ ID NO: 4729), X-SPLSDPSS*P-C(Sx)-ASEDF-Z (SEQ ID NO: 1182), X-SPLSDPSSP-C(Sx)-AS*EDF-Z (SEQ ID NO: 4730), X-SPS-C(Sx)-RS*RSRSRSRSPGRPSK-Z (SEQ ID NO: 4731), X-SPSRRS*R-C(Sx)-RSRSRSPGRPSK-Z (SEQ ID NO: 4732), X-SPSRRSR-C(Sx)-RS*RSRSPGRPSK-Z (SEQ ID NO: 4733), X-SPSRRSRS*R-C(Sx)-RSRSPGRPSK-Z (SEQ ID NO: 4734), X-SPSRRSRSR-C(Sx)-RS*RSPGRPSK-Z (SEQ ID NO: 4735), X-SPSRRSRSRS*R-C(Sx)-RSPGRPSK-Z (SEQ ID NO: 4736), X-SPSRRSRSRSR-C(Sx)-RS*PGRPSK-Z (SEQ ID NO: 4737), X-SPSRRSRSRSRS*R-C(Sx)-PGRPSK-Z (SEQ ID NO: 4738), X-SPSRRSRSRSRSRS*P-C(Sx)-RPSK-Z (SEQ ID NO: 4739), X-SR-C(Sx)-LS*VSSLPGLED-Z (SEQ ID NO: 4740), X-SRDPVART*S-C(Sx)-LQTPA-Z (SEQ ID NO: 1104), X-SRLRD-C(Sx)-PS*APLEAPE-Z (SEQ ID NO: 1171), X-SRRS*G-C(Sx)-SSPSYVAVT-Z (SEQ ID NO: 4742), X-SRRSG-C(Sx)-SS*PSYVAVT-Z (SEQ ID NO: 1063), X-SRRSGLSS*P-C(Sx)-YVAVT-Z (SEQ ID NO: 1062), X-SRSHSAKT*P-C(Sx)-FSVQS-Z (SEQ ID NO: 1069), X-SRSHSAKT*PG-C(Sx)-SVQS-Z (SEQ ID NO: 4743), X-SRSHSAKTP-C(Sx)-FS*VQS-Z (SEQ ID NO: 4744), X-SRSHS-C(Sx)-KT*PGFSVQS-Z (SEQ ID NO: 4745), X-SRSRS*R-C(Sx)-RAPGRPSKG-Z (SEQ ID NO: 4746), X-SRSRS*R-C(Sx)-RGPGRPSKG-Z (SEQ ID NO: 4747), X-SRSRS*R-C(Sx)-RSPGRPSKG-Z (SEQ ID NO: 4748), X-SRSRSNSRSRS*Y-C(Sx)-PRRSRGS-Z (SEQ ID NO: 4749), X-SRSRSNSRSRSYS*P-C(Sx)-RSRGS-Z (SEQ ID NO: 4750), X-SRSRSNSRSRSYSP-C(Sx)-RS*RGS-Z (SEQ ID NO: 4751), X-SRSRSR-C(Sx)-RS*PGRPSKG-Z (SEQ ID NO: 4752), X-SRSRSRSNSRSRSYS*P-C(Sx)-RSR-Z (SEQ ID NO: 4753), X-SRSRSRSNSRSRSYSP-C(Sx)-RS*R-Z (SEQ ID NO: 4754), X-SRSRSRSRS*P-C(Sx)-RPSKGR-Z (SEQ ID NO: 4755), X-SRSRSRSRS*P-C(Sx)-RPSKG-Z (SEQ ID NO: 4756), X-SRSRSRSRSNSRSRS*Y-C(Sx)-PRR-Z (SEQ ID NO: 4757), X-SRSRSRSRSNSRSRSYS*P-C(Sx)-R-Z (SEQ ID NO: 4758), X-SSKIRRLS*A-C(Sx)-KQQ-Z (SEQ ID NO: 4759), X-SSKRAKAKTTKKRPQRAT*S-C(Sx)-VFS-Z (SEQ ID NO: 4760), X-SSKRAKAKTTKKRPQRATS*N-C(Sx)-FS-Z (SEQ ID NO: 998), X-SSKRAKAKTTKKRPQRATSN-C(Sx)-FS*-Z (SEQ ID NO: 4761), X-SSLET-C(Sx)-ST*QELYSIP-Z (SEQ ID NO: 4762), X-SSPS-C(Sx)-RS*RSRSRSRS-Z (SEQ ID NO: 4763), X-SSPSRR-C(Sx)-RS*RSRSRS-Z (SEQ ID NO: 4764), X-SSPSRRS*R-C(Sx)-RSRSRS-Z (SEQ ID NO: 4765), X-SSPSRRSR-C(Sx)-RS*RSRS-Z (SEQ ID NO: 4766), X-SSPSRRSRSRS*R-C(Sx)-RA-Z (SEQ ID NO: 4767), X-SSPSRRSRSRS*R-C(Sx)-RG-Z (SEQ ID NO: 4768), X-SSPSRRSRSRS*R-C(Sx)-RS-Z (SEQ ID NO: 4769), X-SSPSRRSRSRSR-C(Sx)-RS*-Z (SEQ ID NO: 4770), and X-SSPSRRSRSRSRS*R-C(Sx)-Z (SEQ ID NO: 4771); or
a compound selected from the group consisting of: X-KKSR-C(Sx)-DY*[Nle]T[Nle]QIG-Z (SEQ ID NO: 5051), X-KKKQAATGFGSP-C(Sx)-QY*SAD-Z (SEQ ID NO: 5048), X-KKKRAHEEIY*F-C(Sx)-FWG-Z (SEQ ID NO: 916), X-KKKSNPALLSSP-C(Sx)-YY*SAA-Z (SEQ ID NO: 5049), X-KKKTSF[Nle][Nle][pT]PY*V-C(Sx)-TRY-Z (SEQ ID NO: 5050), X-KKTNSSEGLSMGNY*I-C(Sx)-LINR-Z (SEQ ID NO: 5052), X-KVSETDDY*A-C(Sx)-IIDEE-Z (SEQ ID NO: 5053), X-LEEEEY*I-C(Sx)-Z (SEQ ID NO: 5054), X-LEEEY*I-C(Sx)-IV-Z (SEQ ID NO: 5055), X-LHQEDNDY*I-C(Sx)-ASLIK-Z (SEQ ID NO: 969), X-LHQEDNDY*IN-C(Sx)-SLIK-Z (SEQ ID NO: 970), X-LMLRLQDY*E-C(Sx)-KTKKA-Z (SEQ ID NO: 951), X-LSRDLIMK-C(Sx)-DY*ELVSTKPTR-Z (SEQ ID NO: 5056), X-LSRDLIMKEDY*E-C(Sx)-VSTKPTR-Z (SEQ ID NO: 5057), X-LSRDLIMKEDY*E-C(Sx)-VSTK-Z (SEQ ID NO: 5058), X-LVSETDDY*A-C(Sx)-IIDEE-Z (SEQ ID NO: 5059), X-MAEEKKAY*K-C(Sx)-AKERE-Z (SEQ ID NO: 932), X-MEEEEY*I-C(Sx)-Z (SEQ ID NO: 5060), X-MEEEY*I-C(Sx)-IV-Z (SEQ ID NO: 5061), X-MK-C(Sx)-DY*ELVSTKPTRTSKVR-Z (SEQ ID NO: 5062), X-MQDNS-C(Sx)-TY*GKIWEGS-Z (SEQ ID NO: 963), X-MRHVSISY*D-C(Sx)-PPTPG-Z (SEQ ID NO: 953), X-NEEEEY*I-C(Sx)-Z (SEQ ID NO: 5063), X-NEEEY*I-C(Sx)-IV-Z (SEQ ID NO: 5064), X-NFANFSAY*P-C(Sx)-EEDMI-Z (SEQ ID NO: 949), X-NHIG-C(Sx)-TGY*LNTVTVSAKKK-Z (SEQ ID NO: 5065), X-NKVDD-C(Sx)-NY*AIKRIRL-Z (SEQ ID NO: 5066), X-NKVDDCNY*A-C(Sx)-KRIRL-Z (SEQ ID NO: 5067), X-NVSETDDY*A-C(Sx)-IIDEE-Z (SEQ ID NO: 5068), X-PAFDNLYY*W-C(Sx)-QDPPE-Z (SEQ ID NO: 990), X-PEEEEY*I-C(Sx)-Z (SEQ ID NO: 5069), X-PEEEY*I-C(Sx)-IV-Z (SEQ ID NO: 5070), X-PTAENPEY*L-C(Sx)-LDVPV-Z (SEQ ID NO: 991), X-PTGEAPTY*V-C(Sx)-TQQIP-Z (SEQ ID NO: 983), X-PVPEY*I-C(Sx)-QSV-Z (SEQ ID NO: 941), X-PVSETDDY*A-C(Sx)-IIDEE-Z (SEQ ID NO: 5071), X-QALDNPEY*H-C(Sx)-ASNGP-Z (SEQ ID NO: 992), X-QEEEEY*I-C(Sx)-Z (SEQ ID NO: 5072), X-QEEEY*I-C(Sx)-IV-Z (SEQ ID NO: 5073), X-QLAAK-C(Sx)-AY*LQILSEE-Z (SEQ ID NO: 5074), X-QLAAKLAY*L-C(Sx)-ILSEE-Z (SEQ ID NO: 5075), X-QLTFALRY*L-C(Sx)-FFTKA-Z (SEQ ID NO: 961), X-QVSETDDY*A-C(Sx)-IIDEE-Z (SEQ ID NO: 5076), X-RAEEEEY*I-C(Sx)-LVA-Z (SEQ ID NO: 909), X-RAHEEIY*F-C(Sx)-FWG-Z (SEQ ID NO: 924), X-R-C(Sx)-DY*[Nle]TMQIGKK-Z (SEQ ID NO: 5077), X-REEEEY*I-C(Sx)-Z (SEQ ID NO: 5078), X-REEEY*I-C(Sx)-IV-Z (SEQ ID NO: 5079), X-RLDGE-C(Sx)-IY*IRHSNLM-Z (SEQ ID NO: 948), X-RNEEENIY*S-C(Sx)-PHDST-Z (SEQ ID NO: 959), X-RNEGVATY*A-C(Sx)-AVLFR-Z (SEQ ID NO: 937), X-RQGSSDIY*S-C(Sx)-PEGKL-Z (SEQ ID NO: 982), X-RRAEEEEY*I-C(Sx)-LVA-Z (SEQ ID NO: 908), X-RRHY*Y-C(Sx)-DTHTNTYYLRTFGHNTRR-Z (SEQ ID NO: 5080), X-RRHYYYDTHTNTY*Y-C(Sx)-RTFGHNTRR-Z (SEQ ID NO: 5081), X-RRRAEEEEY*I-C(Sx)-LVA-Z (SEQ ID NO: 993), X-RVSETDDY*A-C(Sx)-IIDEE-Z (SEQ ID NO: 5082), X-S[Nle]SETDDY*A-C(Sx)-IIDEE-Z (SEQ ID NO: 5083), X-SASETDDY*A-C(Sx)-IIDEE-Z (SEQ ID NO: 5084), X-SDSETDDY*A-C(Sx)-IIDEE-Z (SEQ ID NO: 5085), X-SEELDENY*V-C(Sx)-MNPNS-Z (SEQ ID NO: 954), X-SEGLSM-C(Sx)-NY*IGLINRIKK-Z (SEQ ID NO: 5086), X-SESETDDY*A-C(Sx)-IIDEE-Z (SEQ ID NO: 5087), X-SFSETDDY*A-C(Sx)-IIDEE-Z (SEQ ID NO: 5088), X-SGSETDDY*A-C(Sx)-IIDEE-Z (SEQ ID NO: 5089), X-SHDSEENY*V-C(Sx)-MNPNL-Z (SEQ ID NO: 956), X-SHSETDDY*A-C(Sx)-IIDEE-Z (SEQ ID NO: 5090), X-SISETDDY*A-C(Sx)-IIDEE-Z (SEQ ID NO: 5091), X-SKSETDDY*A-C(Sx)-IIDEE-Z (SEQ ID NO: 5092), X-SLSETDDY*A-C(Sx)-IIDEE-Z (SEQ ID NO: 5093), X-SNSETDDY*A-C(Sx)-IIDEE-Z (SEQ ID NO: 5094), X-SPAFD-C(Sx)-LY*[pY]WDQDPP-Z (SEQ ID NO: 989), X-SPAFD-C(Sx)-LY*YWDQDPP-Z (SEQ ID NO: 988), and X-SPATDLY*Q-C(Sx)-PPG-Z (SEQ ID NO: 5095); or
a compound selected from the group consisting of: X-GDQDYLS*L-C(Sx)-VG-Z (SEQ ID NO: 651), X-R-C(Sx)-HY*[Nle]TMQIGKK-Z (SEQ ID NO: 5430); X-R-C(Sx)-IY*[Nle]TMQIGKK-Z (SEQ ID NO: 5431); X-R-C(Sx)-KY*[Nle]TMQIGKK-Z (SEQ ID NO: 5432); X-R-C(Sx)-LY*[Nle]TMQIGKK-Z (SEQ ID NO: 5433); X-R-C(Sx)-NY*[Nle]TMQIGKK-Z (SEQ ID NO: 5434); X-R-C(Sx)-PY*[Nle]TMQIGKK-Z (SEQ ID NO: 5435); X-R-C(Sx)-QY*[Nle]TMQIGKK-Z (SEQ ID NO: 5436); X-R-C(Sx)-RY*[Nle]TMQIGKK-Z (SEQ ID NO: 5437); X-R-C(Sx)-VY*[Nle]TMQIGKK-Z (SEQ ID NO: 5438); X-V-C(Sx)-DY*[Nle]TMQIGKK-Z (SEQ ID NO: 5439); X-KKHTDDGYM-C(Sx)-MS*PGVA-Z (SEQ ID NO: 5440); X-KKHT*D-C(Sx)-GYMPMSPGVA-Z (SEQ ID NO: 5441); X-KKHTDDGY[Nle]-C(Sx)-[Nle]S*PGVA-Z (SEQ ID NO: 5442); X-KKHT*D-C(Sx)-GY[Nle]P[Nle]SPGVA-Z (SEQ ID NO: 5443); X-KKKKVKKRPQRAHSD-C(Sx)-FS*-Z (SEQ ID NO: 3473); X-EDFSS*I-C(Sx)-DMDFSALLSQISS (SEQ ID NO: 1720); X-KKRAARATS*-C(Sx)-VFA-Z (SEQ ID NO: 5444); X-ARKRRRHPS*G-C(Sx)-PTA-Z (SEQ ID NO: 1299); X-ARKRRRHPS*G-C(Sx)-PT-Z (SEQ ID NO: 5445); X-ARKRRRHPS*G-C(Sx)-P-Z (SEQ ID NO: 5446); X-ARKRRRHPS*G[dP]-C(Sx)-Z (SEQ ID NO: 5447); X-ARKRRRHPS*GP-C(Sx)-Z (SEQ ID NO: 5448); X-ARKRRRHPS*G-C(Sx)-Z (SEQ ID NO: 5449); X-RRRQFS*L-C(Sx)-Z (SEQ ID NO: 5450); X-KKERLLDDRHDS*G-C(Sx)-DDMKDEE-Z (SEQ ID NO: 5451); X-KKERLLDDRHDS*G-C(Sx)-DEMKDEE-Z (SEQ ID NO: 5452); X-KKERLLDDRHDS*G-C(Sx)-DAMKDEE-Z (SEQ ID NO: 5453); X-KKERLLDDRHDDG-C(Sx)-DS*MKDEE-Z (SEQ ID NO: 5454); X-KKERLLDDRHDEG-C(Sx)-DS*MKDEE-Z (SEQ ID NO: 5455); X-KKERLLDDRHDAG-C(Sx)-DS*MKDEE-Z (SEQ ID NO: 5456); or
a compound selected from the group consisting of: X-KKRAARAT*S-C(Sx)-VFA-Z (SEQ ID NO: 3679), X-KKNPQRAT*S-C(Sx)-VFAMF-Z (SEQ ID NO: 3672), X-KKNVH[Nle]V-C(Sx)-TT*LPVDSRKK-Z (SEQ ID NO: 3673), X-KKPPQRAT*S-C(Sx)-VFAMF-Z (SEQ ID NO: 3674), X-KKPSVNPSIS*P-C(Sx)-HGVAR-Z (SEQ ID NO: 3675), X-KKQPQRAT*S-C(Sx)-VFAMF-Z (SEQ ID NO: 3676), X-KKR[Nle]QRAT*S-C(Sx)-VFAMF-Z (SEQ ID NO: 3677), X-KKRAA-C(Sx)-AT*SDVFA-Z (SEQ ID NO: 3678), X-KKRAARATS*D-C(Sx)-FA-Z (SEQ ID NO: 3680), X-KKRAAR-C(Sx)-TS*DVFA-Z (SEQ ID NO: 3681), X-KKRDQRAT*S-C(Sx)-VFAMF-Z (SEQ ID NO: 3682), X-KKREQRAT*S-C(Sx)-VFAMF-Z (SEQ ID NO: 3683), X-KKRFQRAT*S-C(Sx)-VFAMF-Z (SEQ ID NO: 3684), X-KKRGQRAT*S-C(Sx)-VFAMF-Z (SEQ ID NO: 3685), X-KKRHQRAT*S-C(Sx)-VFAMF-Z (SEQ ID NO: 3686), X-KKRIQRAT*S-C(Sx)-VFAMF-Z (SEQ ID NO: 3687), X-KKRKQRAT*S-C(Sx)-VFAMF-Z (SEQ ID NO: 3688), X-KKRLQRAT*S-C(Sx)-VFAMF-Z (SEQ ID NO: 3689), X-KKRNQRAT*S-C(Sx)-VFAMF-Z (SEQ ID NO: 3690), X-KKRP[Nle]RAT*S-C(Sx)-VFAMF-Z (SEQ ID NO: 3691), X-KKRPDRAT*S-C(Sx)-VFAMF-Z (SEQ ID NO: 3692), X-KKRPERAT*S-C(Sx)-VFAMF-Z (SEQ ID NO: 3693), X-KKRPFRAT*S-C(Sx)-VFAMF-Z (SEQ ID NO: 3694), X-KKRPGRAT*S-C(Sx)-VFAMF-Z (SEQ ID NO: 3695), X-KKRPHRAT*S-C(Sx)-VFAMF-Z (SEQ ID NO: 3696), X-KKRPIRAT*S-C(Sx)-VFAMF-Z (SEQ ID NO: 3697), X-KKRPKRAT*S-C(Sx)-VFAMF-Z (SEQ ID NO: 3698), X-KKRPLRAT*S-C(Sx)-VFAMF-Z (SEQ ID NO: 3699), X-KKRPNRAT*S-C(Sx)-VFAMF-Z (SEQ ID NO: 3700), X-KKRPPRAT*S-C(Sx)-VFAMF-Z (SEQ ID NO: 3701), X-KKRPQ[Nle]AT*S-C(Sx)-VFAMF-Z (SEQ ID NO: 3702), X-KKRPQDAT*S-C(Sx)-VFAMF-Z (SEQ ID NO: 3703), X-KKRPQEAT*S-C(Sx)-VFAMF-Z (SEQ ID NO: 3704), X-KKRPQFAT*S-C(Sx)-VFAMF-Z (SEQ ID NO: 3705), X-KKRPQGAT*S-C(Sx)-VFAMF-Z (SEQ ID NO: 3706), X-KKRPQHAT*S-C(Sx)-VFAMF-Z (SEQ ID NO: 3707), X-KKRPQIAT*S-C(Sx)-VFAMF-Z (SEQ ID NO: 3708), X-KKRPQKAT*S-C(Sx)-VFAMF-Z (SEQ ID NO: 3709), X-KKRPQLAT*S-C(Sx)-VFAMF-Z (SEQ ID NO: 3710), X-KKRPQNAT*S-C(Sx)-VFAMF-Z (SEQ ID NO: 3711), X-KKRPQPAT*S-C(Sx)-VFAMF-Z (SEQ ID NO: 3712), X-KKRPQQAT*S-C(Sx)-VFAMF-Z (SEQ ID NO: 3713), X-KKRPQR[Nle]T*S-C(Sx)-VFAMF-Z (SEQ ID NO: 3714), X-KKRPQRAT*[Nle]-C(Sx)-VFAMF-Z (SEQ ID NO: 3715), X-KKRPQRAT*D-C(Sx)-VFAMF-Z (SEQ ID NO: 3716), X-KKRPQRAT*E-C(Sx)-VFAMF-Z (SEQ ID NO: 3717), X-KKRPQRAT*F-C(Sx)-VFAMF-Z (SEQ ID NO: 3718), X-KKRPQRAT*G-C(Sx)-VFAMF-Z (SEQ ID NO: 3719), X-KKRPQRAT*H-C(Sx)-VFAMF-Z (SEQ ID NO: 3720), X-KKRPQRAT*I-C(Sx)-VFAMF-Z (SEQ ID NO: 3721), X-KKRPQRAT*K-C(Sx)-VFAMF-Z (SEQ ID NO: 3722), X-KKRPQRAT*L-C(Sx)-VFAMF-Z (SEQ ID NO: 3723), X-KKRPQRAT*N-C(Sx)-VFAMF-Z (SEQ ID NO: 3724), X-KKRPQRAT*P-C(Sx)-VFAMF-Z (SEQ ID NO: 3725), X-KKRPQRAT*Q-C(Sx)-VFAMF-Z (SEQ ID NO: 3726), and X-KKRPQRAT*R-C(Sx)-VFAMF-Z (SEQ ID NO: 3727);
wherein:
X is H or acetyl;
Z is OH or NH2;
S* represents S or (phospho)S;
T* represents T or (phospho)T;
Y* represents Y or (phospho)Y;
C(Sx) represents an amino acid of formula (I): [chemical structure]
each R is independently hydrogen, or —SO₂X′, wherein at least one R group is —SO₂X′; X′ is —OR″ or —NR″R′″;
R′ is hydroxyl, amino, or thiol;
R″ is C₁₋₆ alkyl;
R′″ is hydrogen or alkyl; and
n is 1, 2 or 3.

122. The compound of claim 1, wherein the compound is X-EEPIY*V-C(Sx)-FG-Z (SEQ ID NO: 531), or X-EEPIY*V-C(Sx)-VK-Z (SEQ ID NO: 547).

123. The compound of claim 121, wherein the compound is X-C(Sx)-HS*LPRFNR-Z (SEQ ID NO: 1409).

124. The compound of claim 121, wherein the compound is X-EDPEY*I-C(Sx)-IP-Z (SEQ ID NO: 304).

125. The compound of claim 121, wherein the compound is X-KKKKVKKRPQRADS*D-C(Sx)-FA-Z (SEQ ID NO: 3457).

126. The compound of claim 121, wherein the compound is X-EEPIY*I-C(Sx)-VP-Z (SEQ ID NO: 30), or X-GAEEPIY*I-C(Sx)-VPAKKKG-Z (SEQ ID NO: 42).

127. The compound of claim 121, wherein the compound is X-C(Sx)-KT*PKKAKKL-Z (SEQ ID NO: 212), or X-C(Sx)-QS*PKKG-Z (SEQ ID NO: 207).

128. The compound of claim 121, wherein the compound is X-DANPLMA-C(Sx)-GT*LTRRHQNGRF-Z (SEQ ID NO: 1200).

129. The compound of claim 121, wherein the compound is X-C(Sx)-FS*LRRKAK-Z (SEQ ID NO: 220).

130. The compound of claim 121, wherein the compound is X-RLPWWR-C(Sx)-YT*WVRARQVNTKQR-Z (SEQ ID NO: 4513).

131. The compound of claim 121, wherein the compound is X-LKP-C(Sx)-AS*FKKFA-Z (SEQ ID NO: 5485).

132. The compound of claim 121, wherein the compound is X-KKKKVKKRPQRAHS*D-C(Sx)-FS-Z (SEQ ID NO: 3470).

133. The compound of claim 121, wherein the compound is X-SR-C(Sx)-SS*PHQ[pS]EDEEE-Z (SEQ ID NO: 4741),

134. The compound of claim 121, wherein the compound is X-KKSR-C(Sx)-DY*[Nle]T[Nle]QIG-Z (SEQ ID NO: 5051),

135. The compound of claim 121, wherein the compound is X-GDQDYLS*L-C(Sx)-VG-Z (SEQ ID NO: 651).

136. The compound of claim 121, wherein the compound is X-KKRAARAT*S-C(Sx)-VFA-Z (SEQ ID NO: 3679).

137. The compound of claim 121, wherein C(Sx) represents an amino acid of formula (II): [chemical structure]
X′ is —OR″ or —NR″R′″;
R″ is C₁₋₆ alkyl; and
R′″ is hydrogen or C₁₋₆ alkyl.

138. The compound of claim 137, wherein C(Sx) represents an amino acid of formula (II): [chemical structure]

The application's sequence listing, which the Patent Office published only in electronic form, follows.

SEQUENCE LISTING (6278 sequences)

SEQ ID NO: 1 - protein, 9 aa, Artificial Sequence
  Description of Artificial Sequence: Synthetic peptide
  N-term H or Acetyl
  MOD_RES (5)..(5): Tyr or Phospho-Tyr
  MOD_RES (7)..(7): Modified Cys
  See specification as filed for detailed description of substitutions and preferred embodiments
EEEEYICIV

SEQ ID NO: 2 - protein, 8 aa, Artificial Sequence
  Description of Artificial Sequence: Synthetic peptide
  N-term H or Acetyl
  MOD_RES (4)..(4): Tyr or Phospho-Tyr
  MOD_RES (6)..(6): Modified Cys
  See specification as filed for detailed description of substitutions and preferred embodiments
EEEYICIV

SEQ ID NO: 3 - protein, 7 aa, Artificial Sequence
  Description of Artificial Sequence: Synthetic peptide
  N-term H or Acetyl
  MOD_RES (3)..(3): Tyr or Phospho-Tyr
  MOD_RES (5)..(5): Modified Cys
  See specification as filed for detailed description of substitutions and preferred embodiments
EEYICIV

SEQ ID NO: 4 - protein, 6 aa, Artificial Sequence
  Description of Artificial Sequence: Synthetic peptide
  N-term H or Acetyl
  MOD_RES (2)..(2): Tyr or Phospho-Tyr
  MOD_RES (4)..(4): Modified Cys
  See specification as filed for detailed description of substitutions and preferred embodiments
EYICIV

SEQ ID NO: 5 - protein, 5 aa, Artificial Sequence
  Description of Artificial Sequence: Synthetic peptide
  N-term H or Acetyl
  MOD_RES (1)..(1): Tyr or Phospho-Tyr
  MOD_RES (3)..(3): Modified Cys
  See specification as filed for detailed description of substitutions and preferred embodiments
YICIV

SEQ ID NO: 6 - protein, 8 aa, Artificial Sequence
  Description of Artificial Sequence: Synthetic peptide
  N-term H or Acetyl
  MOD_RES (5)..(5): Tyr or Phospho-Tyr
  MOD_RES (7)..(7): Modified Cys
  See specification as filed for detailed description of substitutions and preferred embodiments
EEEEYICI

SEQ ID NO: 7 - protein, 7 aa, Artificial Sequence
  Description of Artificial Sequence: Synthetic peptide
  N-term H or Acetyl
  MOD_RES (4)..(4): Tyr or Phospho-Tyr
  MOD_RES (6)..(6): Modified Cys
  See specification as filed for detailed description of substitutions and preferred embodiments
EEEYICI

SEQ ID NO: 8 - protein, 7 aa, Artificial Sequence
  Description of Artificial Sequence: Synthetic peptide
  N-term H or Acetyl
  MOD_RES (5)..(5): Tyr or Phospho-Tyr
  MOD_RES (7)..(7): Modified Cys
  See specification as filed for detailed description of substitutions and preferred embodiments
EEEEYIC

SEQ ID NO: 9 - protein, 6 aa, Artificial Sequence
  Description of Artificial Sequence: Synthetic peptide
  N-term H or Acetyl
  MOD_RES (3)..(3): Tyr or Phospho-Tyr
  MOD_RES (5)..(5): Modified Cys
  See specification as filed for detailed description of substitutions and preferred embodiments
EEYICI

SEQ ID NO: 10 - protein, 5 aa, Artificial Sequence
  Description of Artificial Sequence: Synthetic peptide
  N-term H or Acetyl
  MOD_RES (2)..(2): Tyr or Phospho-Tyr
  MOD_RES (4)..(4): Modified Cys
  See specification as filed for detailed description of substitutions and preferred embodiments
EYICI

SEQ ID NO: 11 - protein, 4 aa, Artificial Sequence
  Description of Artificial Sequence: Synthetic peptide
  N-term H or Acetyl
  MOD_RES (1)..(1): Tyr or Phospho-Tyr
  MOD_RES (3)..(3): Modified Cys
  See specification as filed for detailed description of substitutions and preferred embodiments
YICI

SEQ ID NO: 12 - protein, 6 aa, Artificial Sequence
  Description of Artificial Sequence: Synthetic peptide
  N-term H or Acetyl
  MOD_RES (4)..(4): Tyr or Phospho-Tyr
  MOD_RES (6)..(6): Modified Cys
  See specification as filed for detailed description of substitutions and preferred embodiments
EEEYIC

SEQ ID NO: 13 - protein, 5 aa, Artificial Sequence
  Description of Artificial Sequence: Synthetic peptide
  N-term H or Acetyl
  MOD_RES (3)..(3): Tyr or Phospho-Tyr
  MOD_RES (5)..(5): Modified Cys
  See specification as filed for detailed description of substitutions and preferred embodiments
EEYIC

SEQ ID NO: 14 - protein, 4 aa, Artificial Sequence
  Description of Artificial Sequence: Synthetic peptide
  N-term H or Acetyl
  MOD_RES (2)..(2): Tyr or Phospho-Tyr
  MOD_RES (4)..(4): Modified Cys
  See specification as filed for detailed description of substitutions and preferred embodiments
EYIC

SEQ ID NO: 15 - protein, 3 aa, Artificial Sequence
  Description of Artificial Sequence: Synthetic peptide
  N-term H or Acetyl
  MOD_RES (1)..(1): Tyr or Phospho-Tyr
  MOD_RES (3)..(3): Modified Cys
  See specification as filed for detailed description of substitutions and preferred embodiments
YIC

SEQ ID NO: 16 - protein, 10 aa, Artificial Sequence
  Description of Artificial Sequence: Synthetic peptide
  N-term H or Acetyl
  MOD_RES (5)..(5): Tyr or Phospho-Tyr
  MOD_RES (7)..(7): Modified Cys
  MOD_RES (8)..(8): Pro or d-isoform of Pro
  MOD_RES (9)..(9): Ala or 2-Nal (i.e. unnatural form of Alanine)
  See specification as filed for detailed description of substitutions and preferred embodiments
EEEIYFCPAG

SEQ ID NO: 17 - protein, 7 aa, Artificial Sequence
  Description of Artificial Sequence: Synthetic peptide
  N-term H or Acetyl
  MOD_RES (5)..(5): Tyr or Phospho-Tyr
  MOD_RES (7)..(7): Modified Cys
  See specification as filed for detailed description of substitutions and preferred embodiments
EEEIYFC

SEQ ID NO: 18 - protein, 6 aa, Artificial Sequence
  Description of Artificial Sequence: Synthetic peptide
  N-term H or Acetyl
  MOD_RES (4)..(4): Tyr or Phospho-Tyr
  MOD_RES (6)..(6): Modified Cys
  See specification as filed for detailed description of substitutions and preferred embodiments
EEIYFC

SEQ ID NO: 19 - protein, 5 aa, Artificial Sequence
  Description of Artificial Sequence: Synthetic peptide
  N-term H or Acetyl
  MOD_RES (3)..(3): Tyr or Phospho-Tyr
  MOD_RES (5)..(5): Modified Cys
  See specification as filed for detailed description of substitutions and preferred embodiments
EIYFC

SEQ ID NO: 20 - protein, 4 aa, Artificial Sequence
  Description of Artificial Sequence: Synthetic peptide
  N-term H or Acetyl
  MOD_RES (2)..(2): Tyr or Phospho-Tyr
  MOD_RES (4)..(4): Modified Cys
  See specification as filed for detailed description of substitutions and preferred embodiments
IYFC

SEQ ID NO: 21 - protein, 3 aa, Artificial Sequence
  Description of Artificial Sequence: Synthetic peptide
  N-term H or Acetyl
  MOD_RES (1)..(1): Tyr or Phospho-Tyr
  MOD_RES (3)..(3): Modified Cys
  See specification as filed for detailed description of substitutions and preferred embodiments
YFC

SEQ ID NO: 22 - protein, 10 aa, Artificial Sequence
  Description of Artificial Sequence: Synthetic peptide
  N-term H or Acetyl
  MOD_RES (5)..(5): Tyr or Phospho-Tyr
  MOD_RES (7)..(7): Modified Cys
  MOD_RES (8)..(8): Pro or d-isoform of Pro
  MOD_RES (9)..(9): Ala or 2-Nal (i.e. unnatural form of Alanine)
  See specification as filed for detailed description of substitutions and preferred embodiments
EEEEYICPAG

SEQ ID NO: 23 - protein, 9 aa, Artificial Sequence
  Description of Artificial Sequence: Synthetic peptide
  N-term H or Acetyl
  MOD_RES (5)..(5): Tyr or Phospho-Tyr
  MOD_RES (7)..(7): Modified Cys
  See specification as filed for detailed description of substitutions and preferred embodiments
EEEEYICVG

SEQ ID NO: 24 - protein, 9 aa, Artificial Sequence
  Description of Artificial Sequence: Synthetic peptide
  N-term H or Acetyl
  MOD_RES (5)..(5): Tyr or Phospho-Tyr
  MOD_RES (7)..(7): Modified Cys
  See specification as filed for detailed description of substitutions and preferred embodiments
DPQEYICLP

SEQ ID NO: 25 - protein, 9 aa, Artificial Sequence
  Description of Artificial Sequence: Synthetic peptide
  N-term H or Acetyl
  MOD_RES (5)..(5): Tyr or Phospho-Tyr
  MOD_RES (7)..(7): Modified Cys
  See specification as filed for detailed description of substitutions and preferred embodiments
EDEDYECVG

SEQ ID NO: 26 - protein, 11 aa, Artificial Sequence
  Description of Artificial Sequence: Synthetic peptide
  N-term H or Acetyl
  MOD_RES (6)..(6): Tyr or Phospho-Tyr
  MOD_RES (8)..(8): Modified Cys
  MOD_RES (9)..(9): Pro or d-isoform of Pro
  MOD_RES (10)..(10): Ala or 2-Nal (i.e. unnatural form of Alanine)
  See specification as filed for detailed description of substitutions and preferred embodiments
EAEAIYACPAG

SEQ ID NO: 27 - protein, 10 aa, Artificial Sequence
  Description of Artificial Sequence: Synthetic peptide
  N-term H or Acetyl
  MOD_RES (6)..(6): Tyr or Phospho-Tyr
  MOD_RES (8)..(8): Modified Cys
  See specification as filed for detailed description of substitutions and preferred embodiments
EAEAIYACPF

SEQ ID NO: 28 - protein, 9 aa, Artificial Sequence
  Description of Artificial Sequence: Synthetic peptide
  N-term H or Acetyl
  MOD_RES (6)..(6): Tyr or Phospho-Tyr
  MOD_RES (8)..(8): Modified Cys
  See specification as filed for detailed description of substitutions and preferred embodiments
EAEAIYACP

SEQ ID NO: 29 - protein, 8 aa, Artificial Sequence
  Description of Artificial Sequence: Synthetic peptide
  N-term H or Acetyl
  MOD_RES (6)..(6): Tyr or Phospho-Tyr
  MOD_RES (8)..(8): Modified Cys
  See specification as filed for detailed description of substitutions and preferred embodiments
EAEAIYAC

SEQ ID NO: 30 - protein, 9 aa, Artificial Sequence
  Description of Artificial Sequence: Synthetic peptide
  N-term H or Acetyl
  MOD_RES (5)..(5): Tyr or Phospho-Tyr
  MOD_RES (7)..(7): Modified Cys
  See specification as filed for detailed description of substitutions and preferred embodiments
EEPIYICVP

SEQ ID NO: 31 - protein, 9 aa, Artificial Sequence
  Description of Artificial Sequence: Synthetic peptide
  N-term H or Acetyl
  MOD_RES (5)..(5): Tyr or Phospho-Tyr
  MOD_RES (7)..(7): Modified Cys
  See specification as filed for detailed description of substitutions and preferred embodiments
DEQIYWCIA

SEQ ID NO: 32 - protein, 12 aa, Artificial Sequence
  Description of Artificial Sequence: Synthetic peptide
  N-term H or Acetyl
  MOD_RES (7)..(7): Tyr or Phospho-Tyr
  MOD_RES (9)..(9): Modified Cys
  MOD_RES (10)..(10): Pro or d-isoform of Pro
  MOD_RES (11)..(11): Ala or 2-Nal (i.e. unnatural form of Alanine)
  See specification as filed for detailed description of substitutions and preferred embodiments
KKGEAIYACPAG

SEQ ID NO: 33 - protein, 15 aa, Artificial Sequence
  Description of Artificial Sequence: Synthetic peptide
  N-term H or Acetyl
  MOD_RES (7)..(7): Tyr or Phospho-Tyr
  MOD_RES (9)..(9): Modified Cys
  See specification as filed for detailed description of substitutions and preferred embodiments
KKGEAIYACPFAKKK

SEQ ID NO: 34 - protein, 15 aa, Artificial Sequence
  Description of Artificial Sequence: Synthetic peptide
  N-term H or Acetyl
  MOD_RES (5)..(5): Modified Cys
  MOD_RES (7)..(7): Tyr or Phospho-Tyr
  See specification as filed for detailed description of substitutions and preferred embodiments
KKGECIYAAPFAKKK

SEQ ID NO: 35 - protein, 8 aa, Artificial Sequence
  Description of Artificial Sequence: Synthetic peptide
  N-term H or Acetyl
  MOD_RES (2)..(2): Modified Cys
  MOD_RES (4)..(4): Tyr or Phospho-Tyr
  See specification as filed for detailed description of substitutions and preferred embodiments
ECIYAAPF

SEQ ID NO: 36 - protein, 5 aa, Artificial Sequence
  Description of Artificial Sequence: Synthetic peptide
  N-term H or Acetyl
  MOD_RES (2)..(2): Modified Cys
  MOD_RES (4)..(4): Tyr or Phospho-Tyr
  See specification as filed for detailed description of substitutions and preferred embodiments
ECIYA

SEQ ID NO: 37 - protein, 4 aa, Artificial Sequence
  Description of Artificial Sequence: Synthetic peptide
  N-term H or Acetyl
  MOD_RES (2)..(2): Modified Cys
  MOD_RES (4)..(4): Tyr or Phospho-Tyr
  See specification as filed for detailed description of substitutions and preferred embodiments
ECIY

SEQ ID NO: 38 - protein, 3 aa, Artificial Sequence
  Description of Artificial Sequence: Synthetic peptide
  N-term H or Acetyl
  MOD_RES (1)..(1): Modified Cys
  MOD_RES (3)..(3): Tyr or Phospho-Tyr
  See specification as filed for detailed description of substitutions and preferred embodiments
CIY

SEQ ID NO: 39 - protein, 11 aa, Artificial Sequence
  Description of Artificial Sequence: Synthetic peptide
  N-term H or Acetyl
  MOD_RES (7)..(7): Tyr or Phospho-Tyr
  MOD_RES (9)..(9): Modified Cys
  See specification as filed for detailed description of substitutions and preferred embodiments
KKGEAIYACPF

SEQ ID NO: 40 - protein, 9 aa, Artificial Sequence
  Description of Artificial Sequence: Synthetic peptide
  N-term H or Acetyl
  MOD_RES (3)..(3): Modified Cys
  MOD_RES (5)..(5): Tyr or Phospho-Tyr
  See specification as filed for detailed description of substitutions and preferred embodiments
PECIYATPG

SEQ ID NO: 41 - protein, 9 aa, Artificial Sequence
  Description of Artificial Sequence: Synthetic peptide
  N-term H or Acetyl
  MOD_RES (5)..(5): Tyr or Phospho-Tyr
  MOD_RES (7)..(7): Modified Cys
  See specification as filed for detailed description of substitutions and preferred embodiments
PEVIYACPG

SEQ ID NO: 42 - protein, 16 aa, Artificial Sequence
  Description of Artificial Sequence: Synthetic peptide
  N-term H or Acetyl
  MOD_RES (7)..(7): Tyr or Phospho-Tyr
  MOD_RES (9)..(9): Modified Cys
  See specification as filed for detailed description of substitutions and preferred embodiments
GAEEPIYICVPAKKKG

SEQ ID NO: 43 - protein, 10 aa, Artificial Sequence
  Description of Artificial Sequence: Synthetic peptide
  N-term H or Acetyl
  MOD_RES (8)..(8): Tyr or Phospho-Tyr
  MOD_RES (10)..(10): Modified Cys
  See specification as filed for detailed description of substitutions and preferred embodiments
KKKKEEIYFC

SEQ ID NO: 44 - protein, 11 aa, Artificial Sequence
  Description of Artificial Sequence: Synthetic peptide
  N-term H or Acetyl
  MOD_RES (4)..(4): Modified Cys
  MOD_RES (6)..(6): Tyr or Phospho-Tyr
  See specification as filed for detailed description of substitutions and preferred embodiments
AEECIYGELEA

SEQ ID NO: 45 - protein, 9 aa, Artificial Sequence
  Description of Artificial Sequence: Synthetic peptide
  N-term H or Acetyl
  MOD_RES (3)..(3): Modified Cys
  MOD_RES (5)..(5): Tyr or Phospho-Tyr
  See specification as filed for detailed description of substitutions and preferred embodiments
EECIYGIFG

SEQ ID NO: 46 - protein, 11 aa, Artificial Sequence
  Description of Artificial Sequence: Synthetic peptide
  N-term H or Acetyl
  MOD_RES (1)..(1): Modified Cys
  MOD_RES (3)..(3): Tyr or Phospho-Tyr
  See specification as filed for detailed description of substitutions and preferred embodiments
CIYETDYYRKG

SEQ ID NO: 47 - protein, 13 aa, Artificial Sequence
  Description of Artificial Sequence: Synthetic peptide
  N-term H or Acetyl
  MOD_RES (5)..(5): Tyr or Phospho-Tyr
  MOD_RES (7)..(7): Modified Cys
  See specification as filed for detailed description of substitutions and preferred embodiments
EEEEYICDYYRKG

SEQ ID NO: 48 - protein, 8 aa, Artificial Sequence
  Description of Artificial Sequence: Synthetic peptide
  N-term H or Acetyl
  MOD_RES (6)..(6): Tyr or Phospho-Tyr
  MOD_RES (8)..(8): Modified Cys
  See specification as filed for detailed description of substitutions and preferred embodiments
ELEDDYEC

SEQ ID NO: 49 - protein, 11 aa, Artificial Sequence
  Description of Artificial Sequence: Synthetic peptide
  N-term H or Acetyl
  MOD_RES (3)..(3): Modified Cys
  MOD_RES (5)..(5): Tyr or Phospho-Tyr
  See specification as filed for detailed description of substitutions and preferred embodiments
EECDYVEFKKK

SEQ ID NO: 50 - protein, 11 aa, Artificial Sequence
  Description of Artificial Sequence: Synthetic peptide
  N-term H or Acetyl
  MOD_RES (5)..(5): Tyr or Phospho-Tyr
  MOD_RES (7)..(7): Modified Cys
  See specification as filed for detailed description of substitutions and preferred embodiments
EEEEYICFKKK

SEQ ID NO: 51 - protein, 21 aa, Artificial Sequence
  Description of Artificial Sequence: Synthetic peptide
  N-term H or Acetyl
  MOD_RES (12)..(12): Tyr or Phospho-Tyr
  MOD_RES (14)..(14): Modified Cys
  See specification as filed for detailed description of substitutions and preferred embodiments
RRRRRRSETDDYACIIDEEDT

SEQ ID NO: 52 - protein, 9 aa, Artificial Sequence
  Description of Artificial Sequence: Synthetic peptide
  N-term H or Acetyl
  MOD_RES (5)..(5): Tyr or Phospho-Tyr
  MOD_RES (7)..(7): Modified Cys
  See specification as filed for detailed description of substitutions and preferred embodiments
RAFIYACIP

SEQ ID NO: 53 - protein, 13 aa, Artificial Sequence
  Description of Artificial Sequence: Synthetic peptide
  N-term H or Acetyl
  MOD_RES (6)..(6): Tyr or Phospho-Tyr
  MOD_RES (8)..(8): Modified Cys
  See specification as filed for detailed description of substitutions and preferred embodiments
DDEPIYACLADIT

SEQ ID NO: 54 - protein, 7 aa, Artificial Sequence
  Description of Artificial Sequence: Synthetic peptide
  N-term H or Acetyl
  MOD_RES (1)..(1): Modified Cys
  MOD_RES (3)..(3): Tyr or Phospho-Tyr
  See specification as filed for detailed description of substitutions and preferred embodiments
CIYGVIE

SEQ ID NO: 55 - protein, 11 aa, Artificial Sequence
  Description of Artificial Sequence: Synthetic peptide
  N-term H or Acetyl
  MOD_RES (4)..(4): Modified Cys
  MOD_RES (6)..(6): Tyr or Phospho-Tyr
  See specification as filed for detailed description of substitutions and preferred embodiments
EEECAYGWLDF

SEQ ID NO: 56 - protein, 9 aa, Artificial Sequence
  Description of Artificial Sequence: Synthetic peptide
  N-term H or Acetyl
  MOD_RES (1)..(1): Modified Cys
  MOD_RES (3)..(3): Tyr or Phospho-Tyr
  See specification as filed for detailed description of substitutions and preferred embodiments
CEYVNIEFG

SEQ ID NO: 57 - protein, 14 aa, Artificial Sequence
  Description of Artificial Sequence: Synthetic peptide
  N-term H or Acetyl
  MOD_RES (6)..(6): Tyr or Phospho-Tyr
  MOD_RES (8)..(8): Modified Cys
  See specification as filed for detailed description of substitutions and preferred embodiments
GEEPLYWCFPAKKK

SEQ ID NO: 58 - protein, 8 aa, Artificial Sequence
  Description of Artificial Sequence: Synthetic peptide
  N-term H or Acetyl
  MOD_RES (6)..(6): Tyr or Phospho-Tyr
  MOD_RES (8)..(8): Modified Cys
  See specification as filed for detailed description of substitutions and preferred embodiments
ESSDDYVC

SEQ ID NO: 59 - protein, 9 aa, Artificial Sequence
  Description of Artificial Sequence: Synthetic peptide
  N-term H or Acetyl
  MOD_RES (7)..(7): Tyr or Phospho-Tyr
  MOD_RES (9)..(9): Modified Cys
  See specification as filed for detailed description of substitutions and preferred embodiments
RAHEEIYHC

SEQ ID NO: 60 - protein, 13 aa, Artificial Sequence
  Description of Artificial Sequence: Synthetic peptide
  N-term H or Acetyl
  MOD_RES (4)..(4): Modified Cys
  MOD_RES (6)..(6): Tyr or Phospho-Tyr
  MOD_RES (7)..(7): Tyr or Phospho-Tyr
  See specification as filed for detailed description of substitutions and preferred embodiments
VYSCDYYRLFNPS

SEQ ID NO: 61 - protein, 9 aa, Artificial Sequence
  Description of Artificial Sequence: Synthetic peptide
  N-term H or Acetyl
  MOD_RES (3)..(3): Modified Cys
  MOD_RES (5)..(5): Tyr or Phospho-Tyr
  MOD_RES (6)..(6): Tyr or Phospho-Tyr
  See specification as filed for detailed description of substitutions and preferred embodiments
DECDYYEIP

SEQ ID NO: 62 - protein, 9 aa, Artificial Sequence
  Description of Artificial Sequence: Synthetic peptide
  N-term H or Acetyl
  MOD_RES (3)..(3): Modified Cys
  MOD_RES (5)..(5): Tyr or Phospho-Tyr
  MOD_RES (6)..(6): Tyr or Phospho-Tyr
  See specification as filed for detailed description of substitutions and preferred embodiments
PDCQYYNDF

SEQ ID NO: 63 - protein, 16 aa, Artificial Sequence
  Description of Artificial Sequence: Synthetic peptide
  N-term H or Acetyl
  MOD_RES (6)..(6): Modified Cys
  MOD_RES (8)..(8): Tyr or Phospho-Tyr
  MOD_RES (9)..(9): Tyr or Phospho-Tyr
  MOD_RES (10)..(10): Tyr or Phospho-Tyr
  See specification as filed for detailed description of substitutions and preferred embodiments
GAGEECDYYYIWAGKK

SEQ ID NO: 64 - protein, 11 aa, Artificial Sequence
  Description of Artificial Sequence: Synthetic peptide
  N-term H or Acetyl
  MOD_RES (4)..(4): Modified Cys
  MOD_RES (6)..(6): Tyr or Phospho-Tyr
  MOD_RES (7)..(7): Tyr or Phospho-Tyr
  MOD_RES (8)..(8): Tyr or Phospho-Tyr
  See specification as filed for detailed description of substitutions and preferred embodiments
GEECDYYYIWA

SEQ ID NO: 65 - protein, 9 aa, Artificial Sequence
  Description of Artificial Sequence: Synthetic peptide
  N-term H or Acetyl
  MOD_RES (5)..(5): Tyr or Phospho-Tyr
  MOD_RES (7)..(7): Modified Cys
  See specification as filed for detailed description of substitutions and preferred embodiments
EEEEYFCLV

SEQ ID NO: 66 - protein, 16 aa, Artificial Sequence
  Description of Artificial Sequence: Synthetic peptide
  N-term H or Acetyl
  MOD_RES (7)..(7): Tyr or Phospho-Tyr
  MOD_RES (9)..(9): Modified Cys
  See specification as filed for detailed description of substitutions and preferred embodiments
GADPQEYICLPAKKKG

SEQ ID NO: 67 - protein, 16 aa, Artificial Sequence
  Description of Artificial Sequence: Synthetic peptide
  N-term H or Acetyl
  MOD_RES (7)..(7): Tyr or Phospho-Tyr
  MOD_RES (9)..(9): Modified Cys
  See specification as filed for detailed description of substitutions and preferred embodiments
GAEDEDYECVGAKKKG

SEQ ID NO: 68 - protein, 16 aa, Artificial Sequence
  Description of Artificial Sequence: Synthetic peptide
  N-term H or Acetyl
  MOD_RES (7)..(7): Tyr or Phospho-Tyr
  MOD_RES (9)..(9): Modified Cys
  See specification as filed for detailed description of substitutions and preferred embodiments
GAEEPIYICVPAKKKG

SEQ ID NO: 69 - protein, 16 aa, Artificial Sequence
  Description of Artificial Sequence: Synthetic peptide
  N-term H or Acetyl
  MOD_RES (7)..(7): Tyr or Phospho-Tyr
  MOD_RES (9)..(9): Modified Cys
  See specification as filed for detailed description of substitutions and preferred embodiments
GADEQIYWCIAAKKKG

SEQ ID NO: 70 - protein, 15 aa, Artificial Sequence
  Description of Artificial Sequence: Synthetic peptide
  N-term H or Acetyl
  MOD_RES (5)..(5): Modified Cys
  MOD_RES (7)..(7): Tyr or Phospho-Tyr
  See specification as filed for detailed description of substitutions and preferred embodiments
GAPECIYATPGAKKK

SEQ ID NO: 71 - protein, 15 aa, Artificial Sequence
  Description of Artificial Sequence: Synthetic peptide
  N-term H or Acetyl
  MOD_RES (7)..(7): Tyr or Phospho-Tyr
  MOD_RES (9)..(9): Modified Cys
  See specification as filed for detailed description of substitutions and preferred embodiments
GAPEVIYACPGAKKK

SEQ ID NO: 72 - protein, 16 aa, Artificial Sequence
  Description of Artificial Sequence: Synthetic peptide
  N-term H or Acetyl
  MOD_RES (5)..(5): Modified Cys
  MOD_RES (7)..(7): Tyr or Phospho-Tyr
  See specification as filed for detailed description of substitutions and preferred embodiments
GAEECIYGIFGAKKKG

SEQ ID NO: 73 - protein, 9 aa, Artificial Sequence
  Description of Artificial Sequence: Synthetic peptide
  N-term H or Acetyl
  MOD_RES (1)..(1): Modified Cys
  MOD_RES (3)..(3): Tyr or Phospho-Tyr
  See specification as filed for detailed description of substitutions and preferred embodiments
CDYVEFKKK

SEQ ID NO: 74 - protein, 17 aa, Artificial Sequence
  Description of Artificial Sequence: Synthetic peptide
  N-term H or Acetyl
  MOD_RES (12)..(12): Tyr or Phospho-Tyr
  MOD_RES (14)..(14): Modified Cys
  See specification as filed for detailed description of substitutions and preferred embodiments
RRRRRRSETDDYACIID

SEQ ID NO: 75 - protein, 17 aa, Artificial Sequence
  Description of Artificial Sequence: Synthetic peptide
  N-term H or Acetyl
  MOD_RES (10)..(10): Modified Cys
  MOD_RES (12)..(12): Tyr or Phospho-Tyr
  See specification as filed for detailed description of substitutions and preferred embodiments
RRRRRRSETCDYAEIID

SEQ ID NO: 76 - protein, 16 aa, Artificial Sequence
  Description of Artificial Sequence: Synthetic peptide
  N-term H or Acetyl
  MOD_RES (7)..(7): Tyr or Phospho-Tyr
  MOD_RES (9)..(9): Modified Cys
  See specification as filed for detailed description of substitutions and preferred embodiments
GARAFIYACIPAKKKG

SEQ ID NO: 77 - protein, 13 aa, Artificial Sequence
  Description of Artificial Sequence: Synthetic peptide
  N-term H or Acetyl
  MOD_RES (4)..(4): Modified Cys
  MOD_RES (6)..(6): Tyr or Phospho-Tyr
  See specification as filed for detailed description of substitutions and preferred embodiments
VYSCDYYRLFNPS

SEQ ID NO: 78 - protein, 9 aa, Artificial Sequence
  Description of Artificial Sequence: Synthetic peptide
  N-term H or Acetyl
  MOD_RES (2)..(2): Modified Cys
  MOD_RES (4)..(4): Tyr or Phospho-Tyr
  See specification as filed for detailed description of substitutions and preferred embodiments
ACEYLIPQQ

SEQ ID NO: 79 - protein, 9 aa, Artificial Sequence
  Description of Artificial Sequence: Synthetic peptide
  N-term H or Acetyl
  MOD_RES (3)..(3): Modified Cys
  MOD_RES (5)..(5): Tyr or Phospho-Tyr
  See specification as filed for detailed description of substitutions and preferred embodiments
DECDYYEIP

SEQ ID NO: 80 - protein, 9 aa, Artificial Sequence
  Description of Artificial Sequence: Synthetic peptide
  N-term H or Acetyl
  MOD_RES (3)..(3): Modified Cys
  MOD_RES (5)..(5): Tyr or Phospho-Tyr
  See specification as filed for detailed description of substitutions and preferred embodiments
PDCQYYNDF

SEQ ID NO: 81 - protein, 15 aa, Artificial Sequence
  Description of Artificial Sequence: Synthetic peptide
  N-term H or Acetyl
  MOD_RES (8)..(8): Tyr or Phospho-Tyr
  MOD_RES (10)..(10): Modified Cys
  See specification as filed for detailed description of substitutions and preferred embodiments
EGDEDGIYVCFEPKT

SEQ ID NO: 82 - protein, 15 aa, Artificial Sequence
  Description of Artificial Sequence: Synthetic peptide
  N-term H or Acetyl
  MOD_RES (6)..(6): Modified Cys
  MOD_RES (8)..(8): Tyr or Phospho-Tyr
  See specification as filed for detailed description of substitutions and preferred embodiments
EGDEDCIYVNFEPKT

SEQ ID NO: 83 - protein, 15 aa, Artificial Sequence
  Description of Artificial Sequence: Synthetic peptide
  N-term H or Acetyl
  MOD_RES (8)..(8): Tyr or Phospho-Tyr
  MOD_RES (10)..(10): Modified Cys
  See specification as filed for detailed description of substitutions and preferred embodiments
PAAENPEYLCQQDPV

SEQ ID NO: 84 - protein, 15 aa, Artificial Sequence
  Description of Artificial Sequence: Synthetic peptide
  N-term H or Acetyl
  MOD_RES (6)..(6): Modified Cys
  MOD_RES (8)..(8): Tyr or Phospho-Tyr
  See specification as filed for detailed description of substitutions and preferred embodiments
PAAENCEYLWQQDPV

SEQ ID NO: 85 - protein, 8 aa, Artificial Sequence
  Description of Artificial Sequence: Synthetic peptide
  N-term H or Acetyl
  MOD_RES (4)..(4): Modified Cys
  MOD_RES (6)..(6): Tyr or Phospho-Tyr
  See specification as filed for detailed description of substitutions and preferred embodiments
IYSCDYYR

SEQ ID NO: 86 - protein, 14 aa, Artificial Sequence
  Description of Artificial Sequence: Synthetic peptide
  N-term H or Acetyl
  MOD_RES (6)..(6): Modified Cys
  MOD_RES (8)..(8): Tyr or Phospho-Tyr
  See specification as filed for detailed description of substitutions and preferred embodiments
KGGEECEYFELVKK

SEQ ID NO: 87 - protein, 14 aa, Artificial Sequence
  Description of Artificial Sequence: Synthetic peptide
  N-term H or Acetyl
  MOD_RES (8)..(8): Tyr or Phospho-Tyr
  MOD_RES (10)..(10): Modified Cys
  See specification as filed for detailed description of substitutions and preferred embodiments
KGGEEEEYFCLVKK

SEQ ID NO: 88 - protein, 15 aa, Artificial Sequence
  Description of Artificial Sequence: Synthetic peptide
  N-term H or Acetyl
  MOD_RES (8)..(8): Modified Cys
  MOD_RES (10)..(10): Tyr or Phospho-Tyr
  See specification as filed for detailed description of substitutions and preferred embodiments
KVEKIGECTYGVVYK

SEQ ID NO: 89 - protein, 13 aa, Artificial Sequence
  Description of Artificial Sequence: Synthetic peptide
  N-term H or Acetyl
  MOD_RES (9)..(9): Tyr or Phospho-Tyr
  MOD_RES (11)..(11): Modified Cys
  See specification as filed for detailed description of substitutions and preferred embodiments
RRLIEDNEYTCRG

SEQ ID NO: 90 - protein, 13 aa, Artificial Sequence
  Description of Artificial Sequence: Synthetic peptide
  N-term H or Acetyl
  MOD_RES (9)..(9): Tyr or Phospho-Tyr
  MOD_RES (11)..(11): Modified Cys
  See specification as filed for detailed description of substitutions and preferred embodiments
RRLIEDAEYACRG

SEQ ID NO: 91 - protein, 13 aa, Artificial Sequence
  Description of Artificial Sequence: Synthetic peptide
  N-term H or Acetyl
  MOD_RES (3)..(3): Modified Cys
  MOD_RES (5)..(5): Tyr or Phospho-Tyr
  See specification as filed for detailed description of substitutions and preferred embodiments
EFCIYDFLPAKKK

SEQ ID NO: 92 - protein, 13 aa, Artificial Sequence
  Description of Artificial Sequence: Synthetic peptide
  N-term H or Acetyl
  MOD_RES (5)..(5): Tyr or Phospho-Tyr
  MOD_RES (7)..(7): Modified Cys
  See specification as filed for detailed description of substitutions and preferred embodiments
EFPIYDCLPAKKK

SEQ ID NO: 93 - protein, 14 aa, Artificial Sequence
  Description of Artificial Sequence: Synthetic peptide
  N-term H or Acetyl
  MOD_RES (4)..(4): Modified Cys
  MOD_RES (6)..(6): Tyr or Phospho-Tyr
  See specification as filed for detailed description of substitutions and preferred embodiments
GEECLYWSFPAKKK

SEQ ID NO: 94 - protein, 14 aa, Artificial Sequence
  Description of Artificial Sequence: Synthetic peptide
  N-term H or Acetyl
  MOD_RES (6)..(6): Tyr or Phospho-Tyr
  MOD_RES (8)..(8): Modified Cys
  See specification as filed for detailed description of substitutions and preferred embodiments
GEEPLYWCFPAKKK

SEQ ID NO: 95 - protein, 9 aa, Artificial Sequence
  Description of Artificial Sequence: Synthetic peptide
  N-term H or Acetyl
  MOD_RES (2)..(2): Modified Cys
  MOD_RES (4)..(4): Tyr or Phospho-Tyr
  See specification as filed for detailed description of substitutions and preferred embodiments
ECLYWSFPA

SEQ ID NO: 96 - protein, 9 aa, Artificial Sequence
  Description of Artificial Sequence: Synthetic peptide
  N-term H or Acetyl
  MOD_RES (4)..(4): Tyr or Phospho-Tyr
  MOD_RES (6)..(6): Modified Cys
  See specification as filed for detailed description of substitutions and preferred embodiments
EPLYWCFPA

SEQ ID NO: 97 - protein, 7 aa, Artificial Sequence
  Description of Artificial Sequence: Synthetic peptide
  N-term H or Acetyl
  MOD_RES (1)..(1): Modified Cys
  MOD_RES (3)..(3): Tyr or Phospho-Tyr
  See specification as filed for detailed description of substitutions and preferred embodiments
CIYGSFK

SEQ ID NO: 98 - protein, 12 aa, Artificial Sequence
  Description of Artificial Sequence: Synthetic peptide
  N-term H or Acetyl
  MOD_RES (8)..(8): Tyr or Phospho-Tyr
  MOD_RES (10)..(10): Modified Cys
  See specification as filed for detailed description of substitutions and preferred embodiments
KKKKEEIYFCFG

SEQ ID NO: 99 - protein, 12 aa, Artificial Sequence
  Description of Artificial Sequence: Synthetic peptide
  N-term H or Acetyl
  MOD_RES (8)..(8): Tyr or Phospho-Tyr
  MOD_RES (10)..(10): Modified Cys
  See specification as filed for detailed description of substitutions and preferred embodiments
KKKKEEIYFCFG

SEQ ID NO: 100 - protein, 12 aa, Artificial Sequence
  Description of Artificial Sequence: Synthetic peptide
  N-term H or Acetyl
  MOD_RES (5)..(5): Modified Cys
  MOD_RES (7)..(7): Tyr or Phospho-Tyr
  See specification as filed for detailed description of substitutions and preferred embodiments
ETSKCIYDFIEK

SEQ ID NO: 101 - protein, 12 aa, Artificial Sequence
  Description of Artificial Sequence: Synthetic peptide
  N-term H or Acetyl
  MOD_RES (7)..(7): Tyr or Phospho-Tyr
  MOD_RES (9)..(9): Modified Cys
  See specification as filed for detailed description of substitutions and preferred embodiments
ETSKVIYDCIEK

SEQ ID NO: 102 - protein, 13 aa, Artificial Sequence
  Description of Artificial Sequence: Synthetic peptide
  N-term H or Acetyl
  MOD_RES (8)..(8): Tyr or Phospho-Tyr
  MOD_RES (11)..(11): Modified Cys
  See specification as filed for detailed description of substitutions and preferred embodiments
ARKRERTYSFCHH

SEQ ID NO: 103 - protein, 9 aa, Artificial Sequence
  Description of Artificial Sequence: Synthetic peptide
  N-term H or Acetyl
  MOD_RES (3)..(3): Modified Cys
  MOD_RES (5)..(5): Ser or Phospho-Ser
  See specification as filed for detailed description of substitutions and preferred embodiments
VPCLSPGPF

SEQ ID NO: 104 - protein, 7 aa, Artificial Sequence
  Description of Artificial Sequence: Synthetic peptide
  N-term H or Acetyl
  MOD_RES (1)..(1): Modified Cys
  MOD_RES (3)..(3): Ser or Phospho-Ser
  See specification as filed for detailed description of substitutions and preferred embodiments
CLSPGPF

SEQ ID NO: 105 - protein, 8 aa, Artificial Sequence
  Description of Artificial Sequence: Synthetic peptide
  N-term H or Acetyl
  MOD_RES (1)..(1): Modified Cys
  MOD_RES (3)..(3): Thr or Phospho-Thr
  See specification as filed for detailed description of substitutions and preferred embodiments
CRTPGGRR

SEQ ID NO: 106 - protein, 15 aa, Artificial Sequence
  Description of Artificial Sequence: Synthetic peptide
  N-term H or Acetyl
  MOD_RES (1)..(1): Modified Cys
  MOD_RES (3)..(3): Thr or Phospho-Thr
  See specification as filed for detailed description of substitutions and preferred embodiments
CGTPSGEAPNQALLR

SEQ ID NO: 107 - protein, 16 aa, Artificial Sequence
  Description of Artificial Sequence: Synthetic peptide
  N-term H or Acetyl
  MOD_RES (11)..(11): Modified Cys
  MOD_RES (13)..(13): Ser or Phospho-Ser
  MOD_RES (14)..(14): Ser or Phospho-Ser
  See specification as filed for detailed description of substitutions and preferred embodiments
VLTQMGSPSICSSSVS

SEQ ID NO: 108 - protein, 15 aa, Artificial Sequence
  Description of Artificial Sequence: Synthetic peptide
  N-term H or Acetyl
  MOD_RES (8)..(8): Ser or Phospho-Ser
  MOD_RES (10)..(10): Modified Cys
  See specification as filed for detailed description of substitutions and preferred embodiments
ESTSAPLSPCVTTSP

SEQ ID NO: 109 - protein, 15 aa, Artificial Sequence
  Description of Artificial Sequence: Synthetic peptide
  N-term H or Acetyl
  MOD_RES (8)..(8): Ser or Phospho-Ser
  MOD_RES (10)..(10): Modified Cys
  See specification as filed for detailed description of substitutions and preferred embodiments
GFLSRPLSPCFTTSP

SEQ ID NO: 110 - protein, 15 aa, Artificial Sequence
  Description of Artificial Sequence: Synthetic peptide
  N-term H or Acetyl
  MOD_RES (8)..(8): Ser or Phospho-Ser
  MOD_RES (10)..(10): Modified Cys
  See specification as filed for detailed description of substitutions and preferred embodiments
PSLLRPLSPCFFGAY

SEQ ID NO: 111 - protein, 15 aa, Artificial Sequence
  Description of Artificial Sequence: Synthetic peptide
  N-term H or Acetyl
  MOD_RES (8)..(8): Ser or Phospho-Ser
  MOD_RES (10)..(10): Modified Cys
  See specification as filed for detailed description of substitutions and preferred embodiments
STPSSPSSPCSSVAY

SEQ ID NO: 112 - protein, 15 aa, Artificial Sequence
  Description of Artificial Sequence: Synthetic peptide
  N-term H or Acetyl
  MOD_RES (8)..(8): Ser or Phospho-Ser
  MOD_RES (10)..(10): Modified Cys
  See specification as filed for detailed description of substitutions and preferred embodiments
SHGSAPLSPCAPLTS

SEQ ID NO: 113 - protein, 15 aa, Artificial Sequence
  Description of Artificial Sequence: Synthetic peptide
  N-term H or Acetyl
  MOD_RES (8)..(8): Ser or Phospho-Ser
  MOD_RES (10)..(10): Modified Cys
  See specification as filed for detailed description of substitutions and preferred embodiments
SPFSVLSSPCSGHSN

SEQ ID NO: 114 - protein, 13 aa, Artificial Sequence
  Description of Artificial Sequence: Synthetic peptide
  N-term H or Acetyl
  MOD_RES (9)..(9): Ser or Phospho-Ser
  MOD_RES (11)..(11): Modified Cys
  See specification as filed for detailed description of substitutions and preferred embodiments
ALKLVRYPSFCIT

SEQ ID NO: 115 - protein, 12 aa, Artificial Sequence
  Description of Artificial Sequence: Synthetic peptide
  N-term H or Acetyl
  MOD_RES (9)..(9): Ser or Phospho-Ser
  MOD_RES (11)..(11): Modified Cys
  See specification as filed for detailed description of substitutions and preferred embodiments
ALKLSRYPSFCI

SEQ ID NO: 116 - protein, 16 aa, Artificial Sequence
  Description of Artificial Sequence: Synthetic peptide
  N-term H or Acetyl
  MOD_RES (10)..(10): Thr or Phospho-Thr
  MOD_RES (12)..(12): Modified Cys
  See specification as filed for detailed description of substitutions and preferred embodiments
RKKFGEREKTKCRIRL

SEQ ID NO: 117 - protein, 17 aa, Artificial Sequence
  Description of Artificial Sequence: Synthetic peptide
  N-term H or Acetyl
  MOD_RES (5)..(5): Modified Cys
  MOD_RES (7)..(7): Ser or Phospho-Ser
  See specification as filed for detailed description of substitutions and preferred embodiments
DYMRCSSRRRIRMAHQT

SEQ ID NO: 118 - protein, 17 aa, Artificial Sequence
  Description of Artificial Sequence: Synthetic peptide
  N-term H or Acetyl
  MOD_RES (7)..(7): Modified Cys
  MOD_RES (9)..(9): Ser or Phospho-Ser
  See specification as filed for detailed description of substitutions and preferred embodiments
DYMSARCSSRRRIRHQT

SEQ ID NO: 119 - protein, 12 aa, Artificial Sequence
  Description of Artificial Sequence: Synthetic peptide
  N-term H or Acetyl
  MOD_RES (6)..(6): Modified Cys
  MOD_RES (8)..(8): Ser or Phospho-Ser
  See specification as filed for detailed description of substitutions and preferred embodiments
AHLQRCLSFRRR

SEQ ID NO: 120 - protein, 12 aa, Artificial Sequence
  Description of Artificial Sequence: Synthetic peptide
  N-term H or Acetyl
  MOD_RES (6)..(6): Modified Cys
  MOD_RES (8)..(8): Ser or Phospho-Ser
  See specification as filed for detailed description of substitutions and preferred embodiments
GRTGRCNSFRRR

SEQ ID NO: 121 - protein, 13 aa, Artificial Sequence
  Description of Artificial Sequence: Synthetic peptide
  N-term H or Acetyl
  MOD_RES (7)..(7): Modified Cys
  MOD_RES (9)..(9): Ser or Phospho-Ser
  See specification as filed for detailed description of substitutions and preferred embodiments
ALKLSRCPSFRRR

SEQ ID NO: 122 - protein, 12 aa, Artificial Sequence
  Description of Artificial Sequence: Synthetic peptide
  N-term H or Acetyl
  MOD_RES (6)..(6): Modified Cys
  MOD_RES (8)..(8): Thr or Phospho-Thr
  See specification as filed for detailed description of substitutions and preferred embodiments
RKRDRCGTFRRR

SEQ ID NO: 123 - protein, 13 aa, Artificial Sequence
  Description of Artificial Sequence: Synthetic peptide
  N-term H or Acetyl
  MOD_RES (7)..(7): Modified Cys
  MOD_RES (9)..(9): Ser or Phospho-Ser
  See specification as filed for detailed description of substitutions and preferred embodiments
ARKRERCYSFRRR

SEQ ID NO: 124 - protein, 13 aa, Artificial Sequence
  Description of Artificial Sequence: Synthetic peptide
  N-term H or Acetyl
  MOD_RES (7)..(7): Ser or Phospho-Ser
  MOD_RES (9)..(9): Modified Cys
  See specification as filed for detailed description of substitutions and preferred embodiments
HMRSAMSVCHLVK

SEQ ID NO: 125 - protein, 15 aa, Artificial Sequence
  Description of Artificial Sequence: Synthetic peptide
  N-term H or Acetyl
  MOD_RES (7)..(7): Ser or Phospho-Ser
  MOD_RES (9)..(9): Modified Cys
  See specification as filed for detailed description of substitutions and preferred embodiments
HMRSSMSVCHLVKRR

SEQ ID NO: 126 - protein, 13 aa, Artificial Sequence
  Description of Artificial Sequence: Synthetic peptide
  N-term H or Acetyl
  MOD_RES (7)..(7): Ser or Phospho-Ser
  MOD_RES (9)..(9): Modified Cys
  See specification as filed for detailed description of substitutions and preferred embodiments
HMRSSMSVCHLVK

SEQ ID NO: 127 - protein, 12 aa, Artificial Sequence
  Description of Artificial Sequence: Synthetic peptide
  N-term H or Acetyl
  MOD_RES (7)..(7): Ser or Phospho-Ser
  MOD_RES (9)..(9): Modified Cys
  See specification as filed for detailed description of substitutions and preferred embodiments
HMRSAMSVCHLV

SEQ ID NO: 128 - protein, 7 aa, Artificial Sequence
  Description of Artificial Sequence: Synthetic peptide
  N-term H or Acetyl
  MOD_RES (5)..(5): Ser or Phospho-Ser
  MOD_RES (7)..(7): Modified Cys
  See specification as filed for detailed description of substitutions and preferred embodiments
LRRASLC

SEQ ID NO: 129 - protein, 13 aa, Artificial Sequence
  Description of Artificial Sequence: Synthetic peptide
  N-term H or Acetyl
  MOD_RES (9)..(9): Ser or Phospho-Ser
  MOD_RES (11)..(11): Modified Cys
  See specification as filed for detailed description of substitutions and preferred embodiments
RRREEEEESACAA

SEQ ID NO: 130 - protein, 20 aa, Artificial Sequence
  Description of Artificial Sequence: Synthetic peptide
  N-term H or Acetyl
  MOD_RES (13)..(13): Thr or Phospho-Thr
  MOD_RES (15)..(15): Modified Cys
  See specification as filed for detailed description of substitutions and preferred embodiments
LSNLYHQGKFLQTFCGSPLY

SEQ ID NO: 131 - protein, 17 aa, Artificial Sequence
  Description of Artificial Sequence: Synthetic peptide
  N-term H or Acetyl
  MOD_RES (5)..(5): Modified Cys
  MOD_RES (7)..(7): Thr or Phospho-Thr
  See specification as filed for detailed description of substitutions and preferred embodiments
QGKFCQTFSGSPLYRRR

SEQ ID NO: 132 - protein, 10 aa, Artificial Sequence
  Description of Artificial Sequence: Synthetic peptide
  N-term H or Acetyl
  MOD_RES (8)..(8): Ser or Phospho-Ser
  MOD_RES (10)..(10): Modified Cys
  See specification as filed for detailed description of substitutions and preferred embodiments
KKRNRRLSVC

SEQ ID NO: 133 - protein, 15 aa, Artificial Sequence
  Description of Artificial Sequence: Synthetic peptide
  N-term H or Acetyl
  MOD_RES (8)..(8): Ser or Phospho-Ser
  MOD_RES (10)..(10): Modified Cys
  See specification as filed for detailed description of substitutions and preferred embodiments
AKRRRLASLCASTSK

SEQ ID NO: 134 - protein, 11 aa, Artificial Sequence
  Description of Artificial Sequence: Synthetic peptide
  N-term H or Acetyl
  MOD_RES (7)..(7): Thr or Phospho-Thr
  MOD_RES (9)..(9): Modified Cys
  See specification as filed for detailed description of substitutions and preferred embodiments
GRPRAATFCEG

SEQ ID NO: 135 - protein, 11 aa, Artificial Sequence
  Description of Artificial Sequence: Synthetic peptide
  N-term H or Acetyl
  MOD_RES (4)..(4): Arg or MeArg (i.e. methylarginine)
  MOD_RES (7)..(7): Thr or Phospho-Thr
  MOD_RES (9)..(9): Modified Cys
  See specification as filed for detailed description of substitutions and preferred embodiments
GRPRAFTFCEG

SEQ ID NO: 136 - protein, 11 aa, Artificial Sequence
  Description of Artificial Sequence: Synthetic peptide
  N-term H or Acetyl
  MOD_RES (4)..(4): Arg or MeArg (i.e. methylarginine)
  MOD_RES (5)..(5): Modified Cys
  MOD_RES (7)..(7): Thr or Phospho-Thr
  MOD_RES (9)..(9): Gly or Sarc (i.e. Sarcosine, N-methylglycine)
  See specification as filed for detailed description of substitutions and preferred embodiments
GRPRCFTFGEG

SEQ ID NO: 137 - protein, 8 aa, Artificial Sequence
  Description of Artificial Sequence: Synthetic peptide
  N-term H or Acetyl
  MOD_RES (6)..(6): Thr or Phospho-Thr
  MOD_RES (8)..(8): Modified Cys
  See specification as filed for detailed description of substitutions and preferred embodiments
RPRAATFC

SEQ ID NO: 138 - protein, 11 aa, Artificial Sequence
  Description of Artificial Sequence: Synthetic peptide
  N-term H or Acetyl
  MOD_RES (6)..(6): Thr or Phospho-Thr
  MOD_RES (8)..(8): Modified Cys
  See specification as filed for detailed description of substitutions and preferred embodiments
RPRAATFCHHA

SEQ ID NO: 139 - protein, 13 aa, Artificial Sequence
  Description of Artificial Sequence: Synthetic peptide
  N-term H or Acetyl
  MOD_RES (10)..(10): Thr or Phospho-Thr
  MOD_RES (12)..(12): Modified Cys
  See specification as filed for detailed description of substitutions and preferred embodiments
FFKKIVTPRTPCP

SEQ ID NO: 140 - protein, 17 aa, Artificial Sequence
  Description of Artificial Sequence: Synthetic peptide
  N-term H or Acetyl
  MOD_RES (10)..(10): Thr or Phospho-Thr
  MOD_RES (12)..(12): Modified Cys
  See specification as filed for detailed description of substitutions and preferred embodiments
FFKNIVTPRTPCPSQGK

SEQ ID NO: 141 - protein, 9 aa, Artificial Sequence
  Description of Artificial Sequence: Synthetic peptide
  N-term H or Acetyl
  MOD_RES (4)..(4): Thr or Phospho-Thr
  MOD_RES (6)..(6): Modified Cys
  See specification as filed for detailed description of substitutions and preferred embodiments
APRTPCGRR

SEQ ID NO: 142 - protein, 19 aa, Artificial Sequence
  Description of Artificial Sequence: Synthetic peptide
  N-term H or Acetyl
  MOD_RES (15)..(15): Modified Cys
  MOD_RES (17)..(17): Ser or Phospho-Ser
  See specification as filed for detailed description of substitutions and preferred embodiments
KKKVLTQMGSPSIRCSSVS

SEQ ID NO: 143 - protein, 19 aa, Artificial Sequence
  Description of Artificial Sequence: Synthetic peptide
  N-term H or Acetyl
  MOD_RES (14)..(14): Modified Cys
  MOD_RES (16)..(16): Ser or Phospho-Ser
  MOD_RES (17)..(17): Ser or Phospho-Ser
  See specification as filed for detailed description of substitutions and preferred embodiments
KKKVLTQMGSPSICSSSVS

SEQ ID NO: 144 - protein, 15 aa, Artificial Sequence
  Description of Artificial Sequence: Synthetic peptide
  N-term H or Acetyl
  MOD_RES (8)..(8): Ser or Phospho-Ser
  MOD_RES (10)..(10): Modified Cys
  See specification as filed for detailed description of substitutions and preferred embodiments
SGRSRRKSPCPSPHP

SEQ ID NO: 145 - protein, 15 aa, Artificial Sequence
  Description of Artificial Sequence: Synthetic peptide
  N-term H or Acetyl
  MOD_RES (6)..(6): Modified Cys
  MOD_RES (8)..(8): Ser or Phospho-Ser
  See specification as filed for detailed description of substitutions and preferred embodiments
SGRSRCKSPRPSPHP

SEQ ID NO: 146 - protein, 15 aa, Artificial Sequence
  Description of Artificial Sequence: Synthetic peptide
  N-term H or Acetyl
  MOD_RES (6)..(6): Modified Cys
  MOD_RES (8)..(8): Ser or Phospho-Ser
  See specification as filed for detailed description of substitutions and preferred embodiments
SGRSRCKSVRRSPHP

SEQ ID NO: 147 - protein, 13 aa, Artificial Sequence
  Description of Artificial Sequence: Synthetic peptide
  N-term H or Acetyl
  MOD_RES (8)..(8): Ser or Phospho-Ser
  MOD_RES (10)..(10): Modified Cys
  See specification as filed for detailed description of substitutions and preferred embodiments
KKLNRTLSFCEPG

SEQ ID NO: 148 - protein, 14 aa, Artificial Sequence
  Description of Artificial Sequence: Synthetic peptide
  N-term H or Acetyl
  MOD_RES (9)..(9): Ser or Phospho-Ser
  MOD_RES (11)..(11): Modified Cys
  See specification as filed for detailed description of substitutions and preferred embodiments
KKRPQRATSNCFAM

SEQ ID NO: 149 - protein, 15 aa, Artificial Sequence
  Description of Artificial Sequence: Synthetic peptide
  N-term H or Acetyl
  MOD_RES (8)..(8): Ser or Phospho-Ser
  MOD_RES (10)..(10): Modified Cys
  See specification as filed for detailed description of substitutions and preferred embodiments
RGRSRRDSFCVSPHY

SEQ ID NO: 150 - protein, 15 aa, Artificial Sequence
  Description of Artificial Sequence: Synthetic peptide
  N-term H or Acetyl
  MOD_RES (8)..(8): Ser or Phospho-Ser
  MOD_RES (10)..(10): Modified Cys
  See specification as filed for detailed description of substitutions and preferred embodiments
RKRSRRKSFCVLSSL

SEQ ID NO: 151 - protein, 21 aa, Artificial Sequence
  Description of Artificial Sequence: Synthetic peptide
  N-term H or Acetyl
  MOD_RES (16)..(16): Modified Cys
  MOD_RES (18)..(18): Ser or Phospho-Ser
  See specification as filed for detailed description of substitutions and preferred embodiments
AKRRRLSSLRASTSKCESSQK

SEQ ID NO: 152 - protein, 21 aa, Artificial Sequence
  Description of Artificial Sequence: Synthetic peptide
  N-term H or Acetyl
  MOD_RES (18)..(18): Ser or Phospho-Ser
  MOD_RES (20)..(20): Modified Cys
  See specification as filed for detailed description of substitutions and preferred embodiments
AKRRRLSSLRASTSKSESSCK

SEQ ID NO: 153 - protein, 15 aa, Artificial Sequence
  Description of Artificial Sequence: Synthetic peptide
  N-term H or Acetyl
  MOD_RES (7)..(7): Modified Cys
  MOD_RES (9)..(9): Ser or Phospho-Ser
  See specification as filed for detailed description of substitutions and preferred embodiments
KMQPPRCRSSIMSIT

SEQ ID NO: 154 - protein, 15 aa, Artificial Sequence
  Description of Artificial Sequence: Synthetic peptide
  N-term H or Acetyl
  MOD_RES (9)..(9): Ser or Phospho-Ser
  MOD_RES (11)..(11): Modified Cys
  See specification as filed for detailed description of substitutions and preferred embodiments
KMQPPRSRSSCMSIT

SEQ ID NO: 155 - protein, 15 aa, Artificial Sequence
  Description of Artificial Sequence: Synthetic peptide
  N-term H or Acetyl
  MOD_RES (8)..(8): Ser or Phospho-Ser
  MOD_RES (10)..(10): Modified Cys
  See specification as filed for detailed description of substitutions and preferred embodiments
SGRSRPLSPCPSPHY

SEQ ID NO: 156 - protein, 11 aa, Artificial Sequence
  Description of Artificial Sequence: Synthetic peptide
  N-term H or Acetyl
  MOD_RES (4)..(4): Ser or Phospho-Ser
  MOD_RES (6)..(6): Modified Cys
  See specification as filed for detailed description of substitutions and preferred embodiments
LIDSMCNSFVG

SEQ ID NO: 157 - protein, 11 aa, Artificial Sequence
  Description of Artificial Sequence: Synthetic peptide
  N-term H or Acetyl
  MOD_RES (6)..(6): Modified Cys
  MOD_RES (8)..(8): Ser or Phospho-Ser
  See specification as filed for detailed description of substitutions and preferred embodiments
LIDSMCNSFVG

SEQ ID NO: 158 - protein, 15 aa, Artificial Sequence
  Description of Artificial Sequence: Synthetic peptide
  N-term H or Acetyl
  MOD_RES (6)..(6): Modified Cys
  MOD_RES (8)..(8): Ser or Phospho-Ser
  See specification as filed for detailed description of substitutions and preferred embodiments
PKRSRCSSYPNGHRD

SEQ ID NO: 159 - protein, 15 aa, Artificial Sequence
  Description of Artificial Sequence: Synthetic peptide
  N-term H or Acetyl
  MOD_RES (8)..(8): Ser or Phospho-Ser
  MOD_RES (10)..(10): Modified Cys
  See specification as filed for detailed description of substitutions and preferred embodiments
PKRSRSSSVCPSHSY

SEQ ID NO: 160 - protein, 15 aa, Artificial Sequence
  Description of Artificial Sequence: Synthetic peptide
  N-term H or Acetyl
  MOD_RES (8)..(8): Tyr or Phospho-Tyr
  MOD_RES (10)..(10): Modified Cys
  See specification as filed for detailed description of substitutions and preferred embodiments
SGLEDDDYVCPGGHW

SEQ ID NO: 161 - protein, 17 aa, Artificial Sequence
  Description of Artificial Sequence: Synthetic peptide
  N-term H or Acetyl
  MOD_RES (9)..(9): Ser or Phospho-Ser
  MOD_RES (11)..(11): Modified Cys
  See specification as filed for detailed description of substitutions and preferred embodiments
ALKLVRYPSFCITAKKK

SEQ ID NO: 162 - protein, 16 aa, Artificial Sequence
  Description of Artificial Sequence: Synthetic peptide
  N-term H or Acetyl
  MOD_RES (9)..(9): Ser or Phospho-Ser
  MOD_RES (11)..(11): Modified Cys
  See specification as filed for detailed description of substitutions and preferred embodiments
AMRLERQDSICYPKKK

SEQ ID NO: 163 - protein, 23 aa, Artificial Sequence
  Description of Artificial Sequence: Synthetic peptide
  N-term H or Acetyl
  MOD_RES (14)..(14): Ser or Phospho-Ser
  MOD_RES (16)..(16): Modified Cys
  See specification as filed for detailed description of substitutions and preferred embodiments
KKKVSRSGLYRSPSMCENLNRPR

SEQ ID NO: 164 - protein, 16 aa, Artificial Sequence
  Description of Artificial Sequence: Synthetic peptide
  N-term H or Acetyl
  MOD_RES (13)..(13): Ser or Phospho-Ser
  MOD_RES (15)..(15): Modified Cys
  See specification as filed for detailed description of substitutions and preferred embodiments
KKVSRSGLYRSPSMCE

SEQ ID NO: 165 - protein, 16 aa, Artificial Sequence
  Description of Artificial Sequence: Synthetic peptide
  N-term H or Acetyl
  MOD_RES (11)..(11): Modified Cys
  MOD_RES (13)..(13): Ser or Phospho-Ser
  See specification as filed for detailed description of substitutions and preferred embodiments
KKVSRSGLYRCPSMPE

SEQ ID NO: 166 - protein, 12 aa, Artificial Sequence
  Description of Artificial Sequence: Synthetic peptide
  N-term H or Acetyl
  MOD_RES (7)..(7): Ser or Phospho-Ser
  MOD_RES (9)..(9): Modified Cys
  See specification as filed for detailed description of substitutions and preferred embodiments
GRPRTSSFCEPG

SEQ ID NO: 167 - protein, 14 aa, Artificial Sequence
  Description of Artificial Sequence: Synthetic peptide
  N-term H or Acetyl
  MOD_RES (7)..(7): Ser or Phospho-Ser
  MOD_RES (9)..(9): Modified Cys
  See specification as filed for detailed description of substitutions and preferred embodiments
LRREILSRCPSYRK

SEQ ID NO: 168 - protein, 14 aa, Artificial Sequence
  Description of Artificial Sequence: Synthetic peptide
  N-term H or Acetyl
  MOD_RES (9)..(9): Modified Cys
  MOD_RES (11)..(11): Ser or Phospho-Ser
  See specification as filed for detailed description of substitutions and preferred embodiments
LRREILSRCPSYRK

SEQ ID NO: 169 - protein, 14 aa, Artificial Sequence
  Description of Artificial Sequence: Synthetic peptide
  N-term H or Acetyl
  MOD_RES (5)..(5): Modified Cys
  MOD_RES (7)..(7): Ser or Phospho-Ser
  See specification as filed for detailed description of substitutions and preferred embodiments
LRRECLSRRPSYRK

SEQ ID NO: 170 - protein, 14 aa, Artificial Sequence
  Description of Artificial Sequence: Synthetic peptide
  N-term H or Acetyl
  MOD_RES (11)..(11): Ser or Phospho-Ser
  MOD_RES (13)..(13): Modified Cys
  See specification as filed for detailed description of substitutions and preferred embodiments
LRREILSRRPSYCK

SEQ ID NO: 171 - protein, 15 aa, Artificial Sequence
  Description of Artificial Sequence: Synthetic peptide
  N-term H or Acetyl
  MOD_RES (10)..(10): Ser or Phospho-Ser
  MOD_RES (12)..(12): Modified Cys
  See specification as filed for detailed description of substitutions and preferred embodiments
FQREGFGRQSMCEKR

SEQ ID NO: 172 - protein, 15 aa, Artificial Sequence
  Description of Artificial Sequence: Synthetic peptide
  N-term H or Acetyl
  MOD_RES (8)..(8): Modified Cys
  MOD_RES (10)..(10): Ser or Phospho-Ser
  See specification as filed for detailed description of substitutions and preferred embodiments
FQREGFGCQSMSEKR

SEQ ID NO: 173 - protein, 15 aa, Artificial Sequence
  Description of Artificial Sequence: Synthetic peptide
  N-term H or Acetyl
  MOD_RES (2)..(2): Ser or Phospho-Ser
  MOD_RES (4)..(4): Modified Cys
  See specification as filed for detailed description of substitutions and preferred embodiments
RSRCRSRSRSRSRSR

SEQ ID NO: 174 - protein, 15 aa, Artificial Sequence
  Description of Artificial Sequence: Synthetic peptide
  N-term H or Acetyl
  MOD_RES (4)..(4): Modified Cys
  MOD_RES (6)..(6): Ser or Phospho-Ser
  See specification as filed for detailed description of substitutions and preferred embodiments
RSRCRSRSRSRSRSR

SEQ ID NO: 175 - protein, 15 aa, Artificial Sequence
  Description of Artificial Sequence: Synthetic peptide
  N-term H or Acetyl
  MOD_RES (6)..(6): Ser or Phospho-Ser
  MOD_RES (8)..(8): Modified Cys
  See specification as filed for detailed description of substitutions and preferred embodiments
RSRSRSRCRSRSRSR

SEQ ID NO: 176 - protein, 15 aa, Artificial Sequence
  Description of Artificial Sequence: Synthetic peptide
  N-term H or Acetyl
  MOD_RES (8)..(8): Modified Cys
  MOD_RES (10)..(10): Ser or Phospho-Ser
  See specification as filed for detailed description of substitutions and preferred embodiments
RSRSRSRCRSRSRSR

SEQ ID NO: 177 - protein, 15 aa, Artificial Sequence
  Description of Artificial Sequence: Synthetic peptide
  N-term H or Acetyl
  MOD_RES (10)..(10): Ser or Phospho-Ser
  MOD_RES (12)..(12): Modified Cys
  See specification as filed for detailed description of substitutions and preferred embodiments
RSRSRSRSRSRCRSR

SEQ ID NO: 178 - protein, 15 aa, Artificial Sequence
  Description of Artificial Sequence: Synthetic peptide
  N-term H or Acetyl
  MOD_RES (12)..(12): Modified Cys
  MOD_RES (14)..(14): Ser or Phospho-Ser
  See specification as filed for detailed description of substitutions and preferred embodiments
RSRSRSRSRSRCRSR

SEQ ID NO: 179 - protein, 12 aa, Artificial Sequence
  Description of Artificial Sequence: Synthetic peptide
  N-term H or Acetyl
  MOD_RES (7)..(7): Ser or Phospho-Ser
  MOD_RES (9)..(9): Modified Cys
  See specification as filed for detailed description of substitutions and preferred embodiments
ILLSELSRCRIR

SEQ ID NO: 180 - protein, 12 aa, Artificial Sequence
  Description of Artificial Sequence: Synthetic peptide
  N-term H or Acetyl
  MOD_RES (7)..(7): Ser or Phospho-Ser
  MOD_RES (9)..(9): Modified Cys
  See specification as filed for detailed description of substitutions and preferred embodiments
ILLSESSRCRIR

SEQ ID NO: 181 - protein, 12 aa, Artificial Sequence
  Description of Artificial Sequence: Synthetic peptide
  N-term H or Acetyl
  MOD_RES (5)..(5): Modified Cys
  MOD_RES (7)..(7): Ser or Phospho-Ser
  See specification as filed for detailed description of substitutions and preferred embodiments
ILLRCSSRRIRR

SEQ ID NO: 182 - protein, 23 aa, Artificial Sequence
  Description of Artificial Sequence: Synthetic peptide
  N-term H or Acetyl
  MOD_RES (5)..(5): Modified Cys
  MOD_RES (7)..(7): Ser or Phospho-Ser
  See specification as filed for detailed description of substitutions and preferred embodiments
ILLSCSSRRRIRSGNKLGRIGRN

SEQ ID NO: 183 - protein, 23 aa, Artificial Sequence
  Description of Artificial Sequence: Synthetic peptide
  N-term H or Acetyl
  MOD_RES (5)..(5): Modified Cys
  MOD_RES (7)..(7): Ser or Phospho-Ser
  See specification as filed for detailed description of substitutions and preferred embodiments
ILLSCSSRRRIRSGNKLGRIGRN

SEQ ID NO: 184 - protein, 15 aa, Artificial Sequence
  Description of Artificial Sequence: Synthetic peptide
  N-term H or Acetyl
  MOD_RES (6)..(6): Modified Cys
  MOD_RES (8)..(8): Ser or Phospho-Ser
  See specification as filed for detailed description of substitutions and preferred embodiments
GKRGDCKSVSRSSSS

SEQ ID NO: 185 - protein, 15 aa, Artificial Sequence
  Description of Artificial Sequence: Synthetic peptide
  N-term H or Acetyl
  MOD_RES (6)..(6): Modified Cys
  MOD_RES (8)..(8): Ser or Phospho-Ser
  See specification as filed for detailed description of substitutions and preferred embodiments
SGRSRCDSPRPGTHK

SEQ ID NO: 186 - protein, 15 aa, Artificial Sequence
  Description of Artificial Sequence: Synthetic peptide
  N-term H or Acetyl
  MOD_RES (6)..(6): Modified Cys
  MOD_RES (8)..(8): Ser or Phospho-Ser
  See specification as filed for detailed description of substitutions and preferred embodiments
SKRSRCKSPRRSLSY

SEQ ID NO: 187 - protein, 8 aa, Artificial Sequence
  Description of Artificial Sequence: Synthetic peptide
  N-term H or Acetyl
  MOD_RES (2)..(2): Modified Cys
  MOD_RES (4)..(4): Ser or Phospho-Ser
  See specification as filed for detailed description of substitutions and preferred embodiments
RCLSFRRR

SEQ ID NO: 188 - protein, 12 aa, Artificial Sequence
  Description of Artificial Sequence: Synthetic peptide
  N-term H or Acetyl
  MOD_RES (5)..(5): Thr or Phospho-Thr
  MOD_RES (7)..(7): Modified Cys
  See specification as filed for detailed description of substitutions and preferred embodiments
PLSRTLCVAAKK

SEQ ID NO: 189 - protein, 25 aa, Artificial Sequence
  Description of Artificial Sequence: Synthetic peptide
  N-term H or Acetyl
  MOD_RES (6)..(6): Modified Cys
  MOD_RES (8)..(8): Ser or Phospho-Ser
  See specification as filed for detailed description of substitutions and preferred embodiments
KKKKKCFSFKKSFKLSGFSFKKNKK

SEQ ID NO: 190 - protein, 25 aa, Artificial Sequence
  Description of Artificial Sequence: Synthetic peptide
  N-term H or Acetyl
  MOD_RES (8)..(8): Ser or Phospho-Ser
  MOD_RES (10)..(10): Modified Cys
  See specification as filed for detailed description of substitutions and preferred embodiments
KKKKKRFSFCKSFKLSGFSFKKNKK

SEQ ID NO: 191 - protein, 25 aa, Artificial Sequence
  Description of Artificial Sequence: Synthetic peptide
  N-term H or Acetyl
  MOD_RES (10)..(10): Modified Cys
  MOD_RES (12)..(12): Ser or Phospho-Ser
  See specification as filed for detailed description of substitutions and preferred embodiments
KKKKKRFSFCKSFKLSGFSFKKNKK

SEQ ID NO: 192 - protein, 25 aa, Artificial Sequence
  Description of Artificial Sequence: Synthetic peptide
  N-term H or Acetyl
  MOD_RES (12)..(12): Ser or Phospho-Ser
  MOD_RES (14)..(14): Modified Cys
  See specification as filed for detailed description of substitutions and preferred embodiments
KKKKKRFSFKKSFCLSGFSFKKNKK

SEQ ID NO: 193 - protein, 25 aa, Artificial Sequence
  Description of Artificial Sequence: Synthetic peptide
  N-term H or Acetyl
  MOD_RES (14)..(14): Modified Cys
  MOD_RES (16)..(16): Ser or Phospho-Ser
  See specification as filed for detailed description of substitutions and preferred embodiments
KKKKKRFSFKKSFCLSGFSFKKNKK

SEQ ID NO: 194 - protein, 25 aa, Artificial Sequence
  Description of Artificial Sequence: Synthetic peptide
  N-term H or Acetyl
  MOD_RES (19)..(19): Ser or Phospho-Ser
  MOD_RES (21)..(21): Modified Cys
  See specification as filed for detailed description of substitutions and preferred embodiments
KKKKKRFSFKKSFKLSGFSFCKNKK

SEQ ID NO: 195 - protein, 21 aa, Artificial Sequence
  Description of Artificial Sequence: Synthetic peptide
  N-term H or Acetyl
  MOD_RES (15)..(15): Ser or Phospho-Ser
  MOD_RES (17)..(17): Modified Cys
  See specification as filed for detailed description of substitutions and preferred embodiments
KGTLVQTKGTGASGSFCLNKK

SEQ ID NO: 196 - protein, 9 aa, Artificial Sequence
  Description of Artificial Sequence: Synthetic peptide
  N-term H or Acetyl
  MOD_RES (4)..(4): Modified Cys
  MOD_RES (6)..(6): Ser or Phospho-Ser
  See specification as filed for detailed description of substitutions and preferred embodiments
RRRCSSLRA

SEQ ID NO: 197 - protein, 8 aa, Artificial Sequence
  Description of Artificial Sequence: Synthetic peptide
  N-term H or Acetyl
  MOD_RES (3)..(3): Modified Cys
  MOD_RES (5)..(5): Ser or Phospho-Ser
  See specification as filed for detailed description of substitutions and preferred embodiments
RRCSSLRA

SEQ ID NO: 198 - protein, 8 aa, Artificial Sequence
  Description of Artificial Sequence: Synthetic peptide
  N-term H or Acetyl
  MOD_RES (5)..(5): Ser or Phospho-Ser
  MOD_RES (7)..(7): Modified Cys
  See specification as filed for detailed description of substitutions and preferred embodiments
RRLSSLCA

SEQ ID NO: 199 - protein, 14 aa, Artificial Sequence
  Description of Artificial Sequence: Synthetic peptide
  N-term H or Acetyl
  MOD_RES (3)..(3): Modified Cys
  MOD_RES (5)..(5): Ser or Phospho-Ser
  See specification as filed for detailed description of substitutions and preferred embodiments
RTCRSGSVYEPLKI

SEQ ID NO: 200 - protein, 22 aa, Artificial Sequence
  Description of Artificial Sequence: Synthetic peptide
  N-term H or Acetyl
  MOD_RES (10)..(10): Thr or Phospho-Thr
  MOD_RES (12)..(12): Modified Cys
  See specification as filed for detailed description of substitutions and preferred embodiments
RFAVRDMRQTVCVGVIKAVDKK

SEQ ID NO: 201 - protein, 16 aa, Artificial Sequence
  Description of Artificial Sequence: Synthetic peptide
  N-term H or Acetyl
  MOD_RES (5)..(5): Modified Cys
  MOD_RES (7)..(7): Ser or Phospho-Ser
  See specification as filed for detailed description of substitutions and preferred embodiments
AAKICASFRGHMARKK

SEQ ID NO: 202 - protein, 14 aa, Artificial Sequence
  Description of Artificial Sequence: Synthetic peptide
  N-term H or Acetyl
  MOD_RES (3)..(3): Modified Cys
  MOD_RES (5)..(5): Thr or Phospho-Thr
  See specification as filed for detailed description of substitutions and preferred embodiments
RRCRTGRGRRGIFR

SEQ ID NO: 203 - protein, 11 aa, Artificial Sequence
  Description of Artificial Sequence: Synthetic peptide
  N-term H or Acetyl
  MOD_RES (3)..(3): Modified Cys
  MOD_RES (5)..(5): Ser or Phospho-Ser
  See specification as filed for detailed description of substitutions and preferred embodiments
QKCPSQRSKYL

SEQ ID NO: 204 - protein, 22 aa, Artificial Sequence
  Description of Artificial Sequence: Synthetic peptide
  N-term H or Acetyl
  MOD_RES (16)..(16): Ser or Phospho-Ser
  MOD_RES (18)..(18): Modified Cys
  See specification as filed for detailed description of substitutions and preferred embodiments
STASQDVANRFARKGSLCQKNV

SEQ ID NO: 205 - protein, 22 aa, Artificial Sequence
  Description of Artificial Sequence: Synthetic peptide
  N-term H or Acetyl
  MOD_RES (10)..(10): Thr or Phospho-Thr
  MOD_RES (12)..(12): Modified Cys
  See specification as filed for detailed description of substitutions and preferred embodiments
MFAVRDRRQTVCKGVIKAVDAV

SEQ ID NO: 206 - protein, 15 aa, Artificial Sequence
  Description of Artificial Sequence: Synthetic peptide
  N-term H or Acetyl
  MOD_RES (7)..(7): Modified Cys
  MOD_RES (9)..(9): Thr or Phospho-Thr
  See specification as filed for detailed description of substitutions and preferred embodiments
RLGRDKCKTLRQIRQ

SEQ ID NO: 207 - protein, 15 aa, Artificial Sequence
  Description of Artificial Sequence: Synthetic peptide
  N-term H or Acetyl
  MOD_RES (9)..(9): Thr or Phospho-Thr
  MOD_RES (11)..(11): Modified Cys
  See specification as filed for detailed description of substitutions and preferred embodiments
RLGRDKYKTLCQIRQ

SEQ ID NO: 208 - protein, 16 aa, Artificial Sequence
  Description of Artificial Sequence: Synthetic peptide
  N-term H or Acetyl
  MOD_RES (11)..(11): Ser or Phospho-Ser
  MOD_RES (13)..(13): Modified Cys
  See specification as filed for detailed description of substitutions and preferred embodiments
ERMRPRKRQGSVCRRV

SEQ ID NO: 209 - protein, 10 aa, Artificial Sequence
  Description of Artificial Sequence: Synthetic peptide
  N-term H or Acetyl
  MOD_RES (3)..(3): Thr or Phospho-Thr
  MOD_RES (5)..(5): Modified Cys
  See specification as filed for detailed description of substitutions and preferred embodiments
HATPCKKKRK

SEQ ID NO: 210 - protein, 13 aa, Artificial Sequence
  Description of Artificial Sequence: Synthetic peptide
  N-term H or Acetyl
  MOD_RES (4)..(4): Modified Cys
  MOD_RES (6)..(6): Thr or Phospho-Thr
  See specification as filed for detailed description of substitutions and preferred embodiments
GGGCATPKKAKKL

SEQ ID NO: 211 - protein, 7 aa, Artificial Sequence
  Description of Artificial Sequence: Synthetic peptide
  N-term H or Acetyl
  MOD_RES (1)..(1): Modified Cys
  MOD_RES (3)..(3): Ser or Phospho-Ser
  See specification as filed for detailed description of substitutions and preferred embodiments
CQSPKKG

SEQ ID NO: 212 - protein, 15 aa, Artificial Sequence
  Description of Artificial Sequence: Synthetic peptide
  N-term H or Acetyl
  MOD_RES (8)..(8): Ser or Phospho-Ser
  MOD_RES (10)..(10): Modified Cys
  See specification as filed for detailed description of substitutions and preferred embodiments
RRRFRPASPCRGPPK

SEQ ID NO: 213 - protein, 15 aa, Artificial Sequence
  Description of Artificial Sequence: Synthetic peptide
  N-term H or Acetyl
  MOD_RES (8)..(8): Ser or Phospho-Ser
  MOD_RES (10)..(10): Modified Cys
  See specification as filed for detailed description of substitutions and preferred embodiments
RRRFRPASPCRGPPK

SEQ ID NO: 214 - protein, 13 aa, Artificial Sequence
  Description of Artificial Sequence: Synthetic peptide
  N-term H or Acetyl
  MOD_RES (4)..(4): Ser or Phospho-Ser
  MOD_RES (6)..(6): Modified Cys
  See specification as filed for detailed description of substitutions and preferred embodiments
IPTSPCTTTYFFF

SEQ ID NO: 215 - protein, 13 aa, Artificial Sequence
  Description of Artificial Sequence: Synthetic peptide
  N-term H or Acetyl
  MOD_RES (2)..(2): Modified Cys
  MOD_RES (4)..(4): Ser or Phospho-Ser
  See specification as filed for detailed description of substitutions and preferred embodiments
ICTSPITTTYFFF

SEQ ID NO: 216 - protein, 16 aa, Artificial Sequence
  Description of Artificial Sequence: Synthetic peptide
  N-term H or Acetyl
  MOD_RES (4)..(4): Ser or Phospho-Ser
  MOD_RES (6)..(6): Modified Cys
  See specification as filed for detailed description of substitutions and preferred embodiments
IPTSPCTTTYFFFKKK

SEQ ID NO: 217 - protein, 10 aa, Artificial Sequence
  Description of Artificial Sequence: Synthetic peptide
  N-term H or Acetyl
  MOD_RES (1)..(1): Modified Cys
  MOD_RES (3)..(3): Thr or Phospho-Thr
  See specification as filed for detailed description of substitutions and preferred embodiments
CKTPKKAKKL

SEQ ID NO: 218 - protein, 13 aa, Artificial Sequence
  Description of Artificial Sequence: Synthetic peptide
  N-term H or Acetyl
  MOD_RES (4)..(4): Modified Cys
  MOD_RES (6)..(6): Thr or Phospho-Thr
  See specification as filed for detailed description of substitutions and preferred embodiments
GGGCATPKKAKKL

SEQ ID NO: 219 - protein, 15 aa, Artificial Sequence
  Description of Artificial Sequence: Synthetic peptide
  N-term H or Acetyl
  MOD_RES (7)..(7): Ser or Phospho-Ser
  MOD_RES (9)..(9): Modified Cys
  See specification as filed for detailed description of substitutions and preferred embodiments
HMRSAMSGCHLVKRR

SEQ ID NO: 220 - protein, 15 aa, Artificial Sequence
  Description of Artificial Sequence: Synthetic peptide
  N-term H or Acetyl
  MOD_RES (5)..(5): Modified Cys
  MOD_RES (7)..(7): Ser or Phospho-Ser
  See specification as filed for detailed description of substitutions and preferred embodiments
HMRSCMSGLHLVKRR

SEQ ID NO: 221 - protein, 15 aa, Artificial Sequence
  Description of Artificial Sequence: Synthetic peptide
  N-term H or Acetyl
  MOD_RES (7)..(7): Ser or Phospho-Ser
  MOD_RES (9)..(9): Modified Cys
  See specification as filed for detailed description of substitutions and preferred embodiments
AMARAASACALARRR

SEQ ID NO: 222 - protein, 12 aa, Artificial Sequence
  Description of Artificial Sequence: Synthetic peptide
  N-term H or Acetyl
  MOD_RES (10)..(10): Ser or Phospho-Ser
  MOD_RES (12)..(12): Modified Cys
  See specification as filed for detailed description of substitutions and preferred embodiments
KKKALSRQFSVC

SEQ ID NO: 223 - protein, 10 aa, Artificial Sequence
  Description of Artificial Sequence: Synthetic peptide
  N-term H or Acetyl
  MOD_RES (8)..(8): Ser or Phospho-Ser
  MOD_RES (10)..(10): Modified Cys
  See specification as filed for detailed description of substitutions and preferred embodiments
GRTGRRNSIC

SEQ ID NO: 224 - protein, 13 aa, Artificial Sequence
  Description of Artificial Sequence: Synthetic peptide
  N-term H or Acetyl
  MOD_RES (10)..(10): Ser or Phospho-Ser
  MOD_RES (12)..(12): Modified Cys
  See specification as filed for detailed description of substitutions and preferred embodiments
FLAKRRRLSSLCA

SEQ ID NO: 225 - protein, 10 aa, Artificial Sequence
  Description of Artificial Sequence: Synthetic peptide
  N-term H or Acetyl
  MOD_RES (8)..(8): Thr or Phospho-Thr
  MOD_RES (10)..(10): Modified Cys
  See specification as filed for detailed description of substitutions and preferred embodiments
KKRNRTLTVC

SEQ ID NO: 226 - protein, 9 aa, Artificial Sequence
  Description of Artificial Sequence: Synthetic peptide
  N-term H or Acetyl
  MOD_RES (1)..(1): Modified Cys
  MOD_RES (3)..(3): Ser or Phospho-Ser
  See specification as filed for detailed description of substitutions and preferred embodiments
CFSLRRKAK

SEQ ID NO: 227 - protein, 8 aa, Artificial Sequence
  Description of Artificial Sequence: Synthetic peptide
  N-term H or Acetyl
  MOD_RES (6)..(6): Thr or Phospho-Thr
  MOD_RES (8)..(8): Modified Cys
  See specification as filed for detailed description of substitutions and preferred embodiments
KEIYNTIC

SEQ ID NO: 228 - protein, 13 aa, Artificial Sequence
  Description of Artificial Sequence: Synthetic peptide
  N-term H or Acetyl
  MOD_RES (4)..(4): Ser or Phospho-Ser
  MOD_RES (6)..(6): Modified Cys
  See specification as filed for detailed description of substitutions and preferred embodiments
RKISACEFDRPLR

SEQ ID NO: 229 - protein, 13 aa, Artificial Sequence
  Description of Artificial Sequence: Synthetic peptide
  N-term H or Acetyl
  MOD_RES (2)..(2): Modified Cys
  MOD_RES (4)..(4): Ser or Phospho-Ser
  See specification as filed for detailed description of substitutions and preferred embodiments
RCISASEFDRPLR

SEQ ID NO: 230 - protein, 13 aa, Artificial Sequence
  Description of Artificial Sequence: Synthetic peptide
  N-term H or Acetyl
  MOD_RES (4)..(4): Ser or Phospho-Ser
  MOD_RES (6)..(6): Modified Cys
  See specification as filed for detailed description of substitutions and preferred embodiments
RKISACEFDRPLR

SEQ ID NO: 231 - protein, 7 aa, Artificial Sequence
  Description of Artificial Sequence: Synthetic peptide
  N-term H or Acetyl
  MOD_RES (4)..(4): Ser or Phospho-Ser
  MOD_RES (6)..(6): Modified Cys
  See specification as filed for detailed description of substitutions and preferred embodiments
RKRSRCE

SEQ ID NO: 232 - protein, 11 aa, Artificial Sequence
  Description of Artificial Sequence: Synthetic peptide
  N-term H or Acetyl
  MOD_RES (6)..(6): Ser or Phospho-Ser
  MOD_RES (8)..(8): Modified Cys
  See specification as filed for detailed description of substitutions and preferred embodiments
RARTLSFCEPG

SEQ ID NO: 233 - protein, 13 aa, Artificial Sequence
  Description of Artificial Sequence: Synthetic peptide
  N-term H or Acetyl
  MOD_RES (5)..(5): Modified Cys
  MOD_RES (7)..(7): Ser or Phospho-Ser
  MOD_RES (11)..(11): Ser or Phospho-Ser
  See specification as filed for detailed description of substitutions and preferred embodiments
KRRECLSRRPSYR

SEQ ID NO: 234 - protein, 16 aa, Artificial Sequence
  Description of Artificial Sequence: Synthetic peptide
  N-term H or Acetyl
  MOD_RES (7)..(7): Modified Cys
  MOD_RES (9)..(9): Ser or Phospho-Ser
  MOD_RES (13)..(13): Ser or Phospho-Ser
  See specification as filed for detailed description of substitutions and preferred embodiments
RRAAEECDSRAGSPQL

SEQ ID NO: 235 - protein, 10 aa, Artificial Sequence
  Description of Artificial Sequence: Synthetic peptide
  N-term H or Acetyl
  MOD_RES (4)..(4): Modified Cys
  MOD_RES (6)..(6): Thr or Phospho-Thr
  See specification as filed for detailed description of substitutions and preferred embodiments
RYRCPTGMYY

SEQ ID NO: 236 - protein, 10 aa, Artificial Sequence
  Description of Artificial Sequence: Synthetic peptide
  N-term H or Acetyl
  MOD_RES (6)..(6): Thr or Phospho-Thr
  MOD_RES (8)..(8): Modified Cys
  See specification as filed for detailed description of substitutions and preferred embodiments
RYRHPTRCYY

SEQ ID NO: 237 - protein, 15 aa, Artificial Sequence
  Description of Artificial Sequence: Synthetic peptide
  N-term H or Acetyl
  MOD_RES (8)..(8): Tyr or Phospho-Tyr
  MOD_RES (11)..(11): Modified Cys
  See specification as filed for detailed description of substitutions and preferred embodiments
KPDRKKRYTVCGNPY

SEQ ID NO: 238 - protein, 10 aa, Artificial Sequence
  Description of Artificial Sequence: Synthetic peptide
  N-term H or Acetyl
  MOD_RES (5)..(5): Ser or Phospho-Ser
  MOD_RES (7)..(7): Modified Cys
  See specification as filed for detailed description of substitutions and preferred embodiments
RRRLSFCEPG

SEQ ID NO: 239 - protein, 15 aa, Artificial Sequence
  Description of Artificial Sequence: Synthetic peptide
  N-term H or Acetyl
  MOD_RES (3)..(3): Modified Cys
  MOD_RES (5)..(5): Thr or Phospho-Thr
  See specification as filed for detailed description of substitutions and preferred embodiments
PLCRTLSVAGLPGKK

SEQ ID NO: 240 - protein, 10 aa, Artificial Sequence
  Description of Artificial Sequence: Synthetic peptide
  N-term H or Acetyl
  MOD_RES (6)..(6): Thr or Phospho-Thr
  MOD_RES (8)..(8): Modified Cys
  See specification as filed for detailed description of substitutions and preferred embodiments
KKLNRTLCVA

SEQ ID NO: 241 - protein, 13 aa, Artificial Sequence
  Description of Artificial Sequence: Synthetic peptide
  N-term H or Acetyl
  MOD_RES (9)..(9): Thr or Phospho-Thr
  MOD_RES (11)..(11): Modified Cys
  See specification as filed for detailed description of substitutions and preferred embodiments
KKALRRQETVCAL

SEQ ID NO: 242 - protein, 23 aa, Artificial Sequence
  Description of Artificial Sequence: Synthetic peptide
  N-term H or Acetyl
  MOD_RES (13)..(13): Thr or Phospho-Thr
  MOD_RES (15)..(15): Modified Cys
  See specification as filed for detailed description of substitutions and preferred embodiments
LSNLYHQGKFLQTFCGSPLYRRR

SEQ ID NO: 243 - protein, 17 aa, Artificial Sequence
  Description of Artificial Sequence: Synthetic peptide
  N-term H or Acetyl
  MOD_RES (10)..(10): Thr or Phospho-Thr
  MOD_RES (12)..(12): Modified Cys
  See specification as filed for detailed description of substitutions and preferred embodiments
RISDELMDATFCDQEAK

SEQ ID NO: 244 - protein, 15 aa, Artificial Sequence
  Description of Artificial Sequence: Synthetic peptide
  N-term H or Acetyl
  MOD_RES (7)..(7): Ser or Phospho-Ser
  MOD_RES (9)..(9): Modified Cys
  See specification as filed for detailed description of substitutions and preferred embodiments
DELMEFSFCDQEAKV

SEQ ID NO: 245 - protein, 13 aa, Artificial Sequence
  Description of Artificial Sequence: Synthetic peptide
  N-term H or Acetyl
  MOD_RES (5)..(5): Thr or Phospho-Thr
  MOD_RES (7)..(7): Modified Cys
  See specification as filed for detailed description of substitutions and preferred embodiments
SGEDTLCDSDDED

SEQ ID NO: 246 - protein, 11 aa, Artificial Sequence
  Description of Artificial Sequence: Synthetic peptide
  N-term H or Acetyl
  MOD_RES (5)..(5): Ser or Phospho-Ser
  MOD_RES (9)..(9): Ser or Phospho-Ser
  MOD_RES (11)..(11): Modified Cys
  See specification as filed for detailed description of substitutions and preferred embodiments
GRHDSGLDSMC

SEQ ID NO: 247 - protein, 13 aa, Artificial Sequence
  Description of Artificial Sequence: Synthetic peptide
  N-term H or Acetyl
  MOD_RES (8)..(8): Ser or Phospho-Ser
  MOD_RES (11)..(11): Ser or Phospho-Ser
  MOD_RES (13)..(13): Modified Cys
  See specification as filed for detailed description of substitutions and preferred embodiments
KRRRALSSVASLC

SEQ ID NO: 248 - protein, 18 aa, Artificial Sequence
  Description of Artificial Sequence: Synthetic peptide
  N-term H or Acetyl
  MOD_RES (15)..(15): Ser or Phospho-Ser
  MOD_RES (17)..(17): Modified Cys
  See specification as filed for detailed description of substitutions and preferred embodiments
RRKDLHDDEEDEAMSICA

SEQ ID NO: 249 - protein, 11 aa, Artificial Sequence
  Description of Artificial Sequence: Synthetic peptide
  N-term H or Acetyl
  MOD_RES (4)..(4): Modified Cys
  MOD_RES (6)..(6): Ser or Phospho-Ser
  See specification as filed for detailed description of substitutions and preferred embodiments
RRACDSDDDDD

SEQ ID NO: 250 - protein, 19 aa, Artificial Sequence
  Description of Artificial Sequence: Synthetic peptide
  N-term H or Acetyl
  MOD_RES (6)..(6): Modified Cys
  MOD_RES (8)..(8): Ser or Phospho-Ser
  See specification as filed for detailed description of substitutions and preferred embodiments
LGKEFCRSYRLRYSRDGRR

SEQ ID NO: 251 - protein, 19 aa, Artificial Sequence
  Description of Artificial Sequence: Synthetic peptide
  N-term H or Acetyl
  MOD_RES (8)..(8): Ser or Phospho-Ser
  MOD_RES (10)..(10): Modified Cys
  See specification as filed for detailed description of substitutions and preferred embodiments
LGKEFSRSYCLRYSRDGRR

SEQ ID NO: 252 - protein, 11 aa, Artificial Sequence
  Description of Artificial Sequence: Synthetic peptide
  N-term H or Acetyl
  MOD_RES (7)..(7): Ser or Phospho-Ser
  MOD_RES (9)..(9): Modified Cys
  See specification as filed for detailed description of substitutions and preferred embodiments
GRPRTSSFCEG

SEQ ID NO: 253 - protein, 8 aa, Artificial Sequence
  Description of Artificial Sequence: Synthetic peptide
  N-term H or Acetyl
  MOD_RES (5)..(5): Ser or Phospho-Ser
  MOD_RES (7)..(7): Modified Cys
  See specification as filed for detailed description of substitutions and preferred embodiments
PRTSSFCE

SEQ ID NO: 254 - protein, 10 aa, Artificial Sequence
  Description of Artificial Sequence: Synthetic peptide
  N-term H or Acetyl
  MOD_RES (7)..(7): Ser or Phospho-Ser
  MOD_RES (9)..(9): Modified Cys
  See specification as filed for detailed description of substitutions and preferred embodiments
KRRRLASLCA

SEQ ID NO: 255 - protein, 10 aa, Artificial Sequence
  Description of Artificial Sequence: Synthetic peptide
  N-term H or Acetyl
  MOD_RES (8)..(8): Ser or Phospho-Ser
  MOD_RES (10)..(10): Modified Cys
  See specification as filed for detailed description of substitutions and preferred embodiments
KKRNRTLSVC

SEQ ID NO: 256 - protein, 16 aa, Artificial Sequence
  Description of Artificial Sequence: Synthetic peptide
  N-term H or Acetyl
  MOD_RES (8)..(8): Modified Cys
  MOD_RES (10)..(10): Thr or Phospho-Thr
  See specification as filed for detailed description of substitutions and preferred embodiments
RKKFGESCKTKTKEFL

SEQ ID NO: 257 - protein, 16 aa, Artificial Sequence
  Description of Artificial Sequence: Synthetic peptide
  N-term H or Acetyl
  MOD_RES (10)..(10): Thr or Phospho-Thr
  MOD_RES (12)..(12): Modified Cys
  See specification as filed for detailed description of substitutions and preferred embodiments
RKKFGESEKTKCKEFL

SEQ ID NO: 258 - protein, 9 aa, Artificial Sequence
  Description of Artificial Sequence: Synthetic peptide
  N-term H or Acetyl
  MOD_RES (5)..(5): Tyr or Phospho-Tyr
  MOD_RES (7)..(7): Modified Cys
  See specification as filed for detailed description of substitutions and preferred embodiments
EDPDYFCFG

SEQ ID NO: 259 - protein, 9 aa, Artificial Sequence
  Description of Artificial Sequence: Synthetic peptide
  N-term H or Acetyl
  MOD_RES (5)..(5): Tyr or Phospho-Tyr
  MOD_RES (7)..(7): Modified Cys
  See specification as filed for detailed description of substitutions and preferred embodiments
EDPDYFCFK

SEQ ID NO: 260 - protein, 9 aa, Artificial Sequence
  Description of Artificial Sequence: Synthetic peptide
  N-term H or Acetyl
  MOD_RES (5)..(5): Tyr or Phospho-Tyr
  MOD_RES (7)..(7): Modified Cys
  See specification as filed for detailed description of substitutions and preferred embodiments
EDPDYFCFP

SEQ ID NO: 261 - protein, 9 aa, Artificial Sequence
  Description of Artificial Sequence: Synthetic peptide
  N-term H or Acetyl
  MOD_RES (5)..(5): Tyr or Phospho-Tyr
  MOD_RES (7)..(7): Modified Cys
  See specification as filed for detailed description of substitutions and preferred embodiments
EDPDYFCIG

SEQ ID NO: 262 - protein, 9 aa, Artificial Sequence
  Description of Artificial Sequence: Synthetic peptide
  N-term H or Acetyl
  MOD_RES (5)..(5): Tyr or Phospho-Tyr
  MOD_RES (7)..(7): Modified Cys
  See specification as filed for detailed description of substitutions and preferred embodiments
EDPDYFCIK

SEQ ID NO: 263 - protein, 9 aa, Artificial Sequence
  Description of Artificial Sequence: Synthetic peptide
  N-term H or Acetyl
  MOD_RES (5)..(5): Tyr or Phospho-Tyr
  MOD_RES (7)..(7): Modified Cys
  See specification as filed for detailed description of substitutions and preferred embodiments
EDPDYFCIP

SEQ ID NO: 264 - protein, 9 aa, Artificial Sequence
  Description of Artificial Sequence: Synthetic peptide
  N-term H or Acetyl
  MOD_RES (5)..(5): Tyr or Phospho-Tyr
  MOD_RES (7)..(7): Modified Cys
  See specification as filed for detailed description of substitutions and preferred embodiments
EDPDYFCMG

SEQ ID NO: 265 - protein, 9 aa, Artificial Sequence
  Description of Artificial Sequence: Synthetic peptide
  N-term H or Acetyl
  MOD_RES (5)..(5): Tyr or Phospho-Tyr
  MOD_RES (7)..(7): Modified Cys
  See specification as filed for detailed description of substitutions and preferred embodiments
EDPDYFCMK

SEQ ID NO: 266 - protein, 9 aa, Artificial Sequence
  Description of Artificial Sequence: Synthetic peptide
  N-term H or Acetyl
  MOD_RES (5)..(5): Tyr or Phospho-Tyr
  MOD_RES (7)..(7): Modified Cys
  See specification as filed for detailed description of substitutions and preferred embodiments
EDPDYFCMP

SEQ ID NO: 267 - protein, 9 aa, Artificial Sequence
  Description of Artificial Sequence: Synthetic peptide
  N-term H or Acetyl
  MOD_RES (5)..(5): Tyr or Phospho-Tyr
  MOD_RES (7)..(7): Modified Cys
  See specification as filed for detailed description of substitutions and preferred embodiments
EDPDYFCVG

SEQ ID NO: 268 - protein, 9 aa, Artificial Sequence
  Description of Artificial Sequence: Synthetic peptide
  N-term H or Acetyl
  MOD_RES (5)..(5): Tyr or Phospho-Tyr
  MOD_RES (7)..(7): Modified Cys
  See specification as filed for detailed description of substitutions and preferred embodiments
EDPDYFCVK

SEQ ID NO: 269 - protein, 9 aa, Artificial Sequence
  Description of Artificial Sequence: Synthetic peptide
  N-term H or Acetyl
  MOD_RES (5)..(5): Tyr or Phospho-Tyr
  MOD_RES (7)..(7): Modified Cys
  See specification as filed for detailed description of substitutions and preferred embodiments
EDPDYFCVP

SEQ ID NO: 270 - protein, 9 aa, Artificial Sequence
  Description of Artificial Sequence: Synthetic peptide
  N-term H or Acetyl
  MOD_RES (5)..(5): Tyr or Phospho-Tyr
  MOD_RES (7)..(7): Modified Cys
  See specification as filed for detailed description of substitutions and preferred embodiments
EDPDYICFG

SEQ ID NO: 271 - protein, 9 aa, Artificial Sequence
  Description of Artificial Sequence: Synthetic peptide
  N-term H or Acetyl
  MOD_RES (5)..(5): Tyr or Phospho-Tyr
  MOD_RES (7)..(7): Modified Cys
  See specification as filed for detailed description of substitutions and preferred embodiments
EDPDYICFK

SEQ ID NO: 272 - protein, 9 aa, Artificial Sequence
  Description of Artificial Sequence: Synthetic peptide
  N-term H or Acetyl
  MOD_RES (5)..(5): Tyr or Phospho-Tyr
  MOD_RES (7)..(7): Modified Cys
  See specification as filed for detailed description of substitutions and preferred embodiments
EDPDYICFP

SEQ ID NO: 273 - protein, 9 aa, Artificial Sequence
  Description of Artificial Sequence: Synthetic peptide
  N-term H or Acetyl
  MOD_RES (5)..(5): Tyr or Phospho-Tyr
  MOD_RES (7)..(7): Modified Cys
  See specification as filed for detailed description of substitutions and preferred embodiments
EDPDYICIG

SEQ ID NO: 274 - protein, 9 aa, Artificial Sequence
  Description of Artificial Sequence: Synthetic peptide
  N-term H or Acetyl
  MOD_RES (5)..(5): Tyr or Phospho-Tyr
  MOD_RES (7)..(7): Modified Cys
  See specification as filed for detailed description of substitutions and preferred embodiments
EDPDYICIK

SEQ ID NO: 275 - protein, 9 aa, Artificial Sequence
  Description of Artificial Sequence: Synthetic peptide
  N-term H or Acetyl
  MOD_RES (5)..(5): Tyr or Phospho-Tyr
  MOD_RES (7)..(7): Modified Cys
  See specification as filed for detailed description of substitutions and preferred embodiments
EDPDYICIP

SEQ ID NO: 276 - protein, 9 aa, Artificial Sequence
  Description of Artificial Sequence: Synthetic peptide
  N-term H or Acetyl
  MOD_RES (5)..(5): Tyr or Phospho-Tyr
  MOD_RES (7)..(7): Modified Cys
  See specification as filed for detailed description of substitutions and preferred embodiments
EDPDYICMG

SEQ ID NO: 277 - protein, 9 aa, Artificial Sequence
  Description of Artificial Sequence: Synthetic peptide
  N-term H or Acetyl
  MOD_RES (5)..(5): Tyr or Phospho-Tyr
  MOD_RES (7)..(7): Modified Cys
  See specification as filed for detailed description of substitutions and preferred embodiments
EDPDYICMK

SEQ ID NO: 278 - protein, 9 aa, Artificial Sequence
  Description of Artificial Sequence: Synthetic peptide
  N-term H or Acetyl
  MOD_RES (5)..(5): Tyr or Phospho-Tyr
  MOD_RES (7)..(7): Modified Cys
  See specification as filed for detailed description of substitutions and preferred embodiments
EDPDYICMP

SEQ ID NO: 279 - protein, 9 aa, Artificial Sequence
  Description of Artificial Sequence: Synthetic peptide
  N-term H or Acetyl
  MOD_RES (5)..(5): Tyr or Phospho-Tyr
  MOD_RES (7)..(7): Modified Cys
  See specification as filed for detailed description of substitutions and preferred embodiments
EDPDYICVG

SEQ ID NO: 280 - protein, 9 aa, Artificial Sequence
  Description of Artificial Sequence: Synthetic peptide
  N-term H or Acetyl
  MOD_RES (5)..(5): Tyr or Phospho-Tyr
  MOD_RES (7)..(7): Modified Cys
  See specification as filed for detailed description of substitutions and preferred embodiments
EDPDYICVK

SEQ ID NO: 281 - protein, 9 aa, Artificial Sequence
  Description of Artificial Sequence: Synthetic peptide
  N-term H or Acetyl
  MOD_RES (5)..(5): Tyr or Phospho-Tyr
  MOD_RES (7)..(7): Modified Cys
  See specification as filed for detailed description of substitutions and preferred embodiments
EDPDYICVP

SEQ ID NO: 282 - protein, 9 aa, Artificial Sequence
  Description of Artificial Sequence: Synthetic peptide
  N-term H or Acetyl
  MOD_RES (5)..(5): Tyr or Phospho-Tyr
  MOD_RES (7)..(7): Modified Cys
  See specification as filed for detailed description of substitutions and preferred embodiments
EDPDYVCFG

SEQ ID NO: 283 - protein, 9 aa, Artificial Sequence
  Description of Artificial Sequence: Synthetic peptide
  N-term H or Acetyl
  MOD_RES (5)..(5): Tyr or Phospho-Tyr
  MOD_RES (7)..(7): Modified Cys
  See specification as filed for detailed description of substitutions and preferred embodiments
EDPDYVCFK

SEQ ID NO: 284 - protein, 9 aa, Artificial Sequence
  Description of Artificial Sequence: Synthetic peptide
  N-term H or Acetyl
  MOD_RES (5)..(5): Tyr or Phospho-Tyr
  MOD_RES (7)..(7): Modified Cys
  See specification as filed for detailed description of substitutions and preferred embodiments
EDPDYVCFP

SEQ ID NO: 285 - protein, 9 aa, Artificial Sequence
  Description of Artificial Sequence: Synthetic peptide
  N-term H or Acetyl
  MOD_RES (5)..(5): Tyr or Phospho-Tyr
  MOD_RES (7)..(7): Modified Cys
  See specification as filed for detailed description of substitutions and preferred embodiments
EDPDYVCIG

SEQ ID NO: 286 - protein, 9 aa, Artificial Sequence
  Description of Artificial Sequence: Synthetic peptide
  N-term H or Acetyl
  MOD_RES (5)..(5): Tyr or Phospho-Tyr
  MOD_RES (7)..(7): Modified Cys
  See specification as filed for detailed description of substitutions and preferred embodiments
EDPDYVCIK

SEQ ID NO: 287 - protein, 9 aa, Artificial Sequence
  Description of Artificial Sequence: Synthetic peptide
  N-term H or Acetyl
  MOD_RES (5)..(5): Tyr or Phospho-Tyr
  MOD_RES (7)..(7): Modified Cys
  See specification as filed for detailed description of substitutions and preferred embodiments
EDPDYVCIP

SEQ ID NO: 288 - protein, 9 aa, Artificial Sequence
  Description of Artificial Sequence: Synthetic peptide
  N-term H or Acetyl
  MOD_RES (5)..(5): Tyr or Phospho-Tyr
  MOD_RES (7)..(7): Modified Cys
  See specification as filed for detailed description of substitutions and preferred embodiments
EDPDYVCMG

SEQ ID NO: 289 - protein, 9 aa, Artificial Sequence
  Description of Artificial Sequence: Synthetic peptide
  N-term H or Acetyl
  MOD_RES (5)..(5): Tyr or Phospho-Tyr
  MOD_RES (7)..(7): Modified Cys
  See specification as filed for detailed description of substitutions and preferred embodiments
EDPDYVCMK

SEQ ID NO: 290 - protein, 9 aa, Artificial Sequence
  Description of Artificial Sequence: Synthetic peptide
  N-term H or Acetyl
  MOD_RES (5)..(5): Tyr or Phospho-Tyr
  MOD_RES (7)..(7): Modified Cys
  See specification as filed for detailed description of substitutions and preferred embodiments
EDPDYVCMP

SEQ ID NO: 291 - protein, 9 aa, Artificial Sequence
  Description of Artificial Sequence: Synthetic peptide
  N-term H or Acetyl
  MOD_RES (5)..(5): Tyr or Phospho-Tyr
  MOD_RES (7)..(7): Modified Cys
  See specification as filed for detailed description of substitutions and preferred embodiments
EDPDYVCVG

SEQ ID NO: 292 - protein, 9 aa, Artificial Sequence
  Description of Artificial Sequence: Synthetic peptide
  N-term H or Acetyl
  MOD_RES (5)..(5): Tyr or Phospho-Tyr
  MOD_RES (7)..(7): Modified Cys
  See specification as filed for detailed description of substitutions and preferred embodiments
EDPDYVCVK

SEQ ID NO: 293 - protein, 9 aa, Artificial Sequence
  Description of Artificial Sequence: Synthetic peptide
  N-term H or Acetyl
  MOD_RES (5)..(5): Tyr or Phospho-Tyr
  MOD_RES (7)..(7): Modified Cys
  See specification as filed for detailed description of substitutions and preferred embodiments
EDPDYVCVP

SEQ ID NO: 294 - protein, 9 aa, Artificial Sequence
  Description of Artificial Sequence: Synthetic peptide
  N-term H or Acetyl
  MOD_RES (5)..(5): Tyr or Phospho-Tyr
  MOD_RES (7)..(7): Modified Cys
  See specification as filed for detailed description of substitutions and preferred embodiments
EDPEYFCFG

SEQ ID NO: 295 - protein, 9 aa, Artificial Sequence
  Description of Artificial Sequence: Synthetic peptide
  N-term H or Acetyl
  MOD_RES (5)..(5): Tyr or Phospho-Tyr
  MOD_RES (7)..(7): Modified Cys
  See specification as filed for detailed description of substitutions and preferred embodiments
EDPEYFCFK

SEQ ID NO: 296 - protein, 9 aa, Artificial Sequence
  Description of Artificial Sequence: Synthetic peptide
  N-term H or Acetyl
  MOD_RES (5)..(5): Tyr or Phospho-Tyr
  MOD_RES (7)..(7): Modified Cys
  See specification as filed for detailed description of substitutions and preferred embodiments
EDPEYFCFP

SEQ ID NO: 297 - protein, 9 aa, Artificial Sequence
  Description of Artificial Sequence: Synthetic peptide
  N-term H or Acetyl
  MOD_RES (5)..(5): Tyr or Phospho-Tyr
  MOD_RES (7)..(7): Modified Cys
  See specification as filed for detailed description of substitutions and preferred embodiments
EDPEYFCIG

SEQ ID NO: 298 - protein, 9 aa, Artificial Sequence
  Description of Artificial Sequence: Synthetic peptide
  N-term H or Acetyl
  MOD_RES (5)..(5): Tyr or Phospho-Tyr
  MOD_RES (7)..(7): Modified Cys
  See specification as filed for detailed description of substitutions and preferred embodiments
EDPEYFCIK

SEQ ID NO: 299 - protein, 9 aa, Artificial Sequence
  Description of Artificial Sequence: Synthetic peptide
  N-term H or Acetyl
  MOD_RES (5)..(5): Tyr or Phospho-Tyr
  MOD_RES (7)..(7): Modified Cys
  See specification as filed for detailed description of substitutions and preferred embodiments
EDPEYFCIP

SEQ ID NO: 300 - protein, 9 aa, Artificial Sequence
  Description of Artificial Sequence: Synthetic peptide
  N-term H or Acetyl
  MOD_RES (5)..(5): Tyr or Phospho-Tyr
  MOD_RES (7)..(7): Modified Cys
  See specification as filed for detailed description of substitutions and preferred embodiments
EDPEYFCMG

SEQ ID NO: 301 - protein, 9 aa, Artificial Sequence
  Description of Artificial Sequence: Synthetic peptide
  N-term H or Acetyl
  MOD_RES (5)..(5): Tyr or Phospho-Tyr
  MOD_RES (7)..(7): Modified Cys
  See specification as filed for detailed description of substitutions and preferred embodiments
EDPEYFCMK

SEQ ID NO: 302 - protein, 9 aa, Artificial Sequence
  Description of Artificial Sequence: Synthetic peptide
  N-term H or Acetyl
  MOD_RES (5)..(5): Tyr or Phospho-Tyr
  MOD_RES (7)..(7): Modified Cys
  See specification as filed for detailed description of substitutions and preferred embodiments
EDPEYFCMP

SEQ ID NO: 303 - protein, 9 aa, Artificial Sequence
  Description of Artificial Sequence: Synthetic peptide
  N-term H or Acetyl
  MOD_RES (5)..(5): Tyr or Phospho-Tyr
  MOD_RES (7)..(7): Modified Cys
  See specification as filed for detailed description of substitutions and preferred embodiments
EDPEYFCVG

SEQ ID NO: 304 - protein, 9 aa, Artificial Sequence
  Description of Artificial Sequence: Synthetic peptide
  N-term H or Acetyl
  MOD_RES (5)..(5): Tyr or Phospho-Tyr
  MOD_RES (7)..(7): Modified Cys
  See specification as filed for detailed description of substitutions and preferred embodiments
EDPEYFCVK

SEQ ID NO: 305 - protein, 9 aa, Artificial Sequence
  Description of Artificial Sequence: Synthetic peptide
  N-term H or Acetyl
  MOD_RES (5)..(5): Tyr or Phospho-Tyr
  MOD_RES (7)..(7): Modified Cys
  See specification as filed for detailed description of substitutions and preferred embodiments
EDPEYFCVP

SEQ ID NO: 306 - protein, 9 aa, Artificial Sequence
  Description of Artificial Sequence: Synthetic peptide
  N-term H or Acetyl
  MOD_RES (5)..(5): Tyr or Phospho-Tyr
  MOD_RES (7)..(7): Modified Cys
  See specification as filed for detailed description of substitutions and preferred embodiments
EDPEYICFG

SEQ ID NO: 307 - protein, 9 aa, Artificial Sequence
  Description of Artificial Sequence: Synthetic peptide
  N-term H or Acetyl
  MOD_RES (5)..(5): Tyr or Phospho-Tyr
  MOD_RES (7)..(7): Modified Cys
  See specification as filed for detailed description of substitutions and preferred embodiments
EDPEYICFK

SEQ ID NO: 308 - protein, 9 aa, Artificial Sequence
  Description of Artificial Sequence: Synthetic peptide
  N-term H or Acetyl
  MOD_RES (5)..(5): Tyr or Phospho-Tyr
  MOD_RES (7)..(7): Modified Cys
  See specification as filed for detailed description of substitutions and preferred embodiments
EDPEYICFP

SEQ ID NO: 309 - protein, 9 aa, Artificial Sequence
  Description of Artificial Sequence: Synthetic peptide
  N-term H or Acetyl
  MOD_RES (5)..(5): Tyr or Phospho-Tyr
  MOD_RES (7)..(7): Modified Cys
  See specification as filed for detailed description of substitutions and preferred embodiments
EDPEYICIG

SEQ ID NO: 310 - protein, 9 aa, Artificial Sequence
  Description of Artificial Sequence: Synthetic peptide
  N-term H or Acetyl
  MOD_RES (5)..(5): Tyr or Phospho-Tyr
  MOD_RES (7)..(7): Modified Cys
  See specification as filed for detailed description of substitutions and preferred embodiments
EDPEYICIK

SEQ ID NO: 311 - protein, 9 aa, Artificial Sequence
  Description of Artificial Sequence: Synthetic peptide
  N-term H or Acetyl
  MOD_RES (5)..(5): Tyr or Phospho-Tyr
  MOD_RES (7)..(7): Modified Cys
  See specification as filed for detailed description of substitutions and preferred embodiments
EDPEYICIP

SEQ ID NO: 312 - protein, 9 aa, Artificial Sequence
  Description of Artificial Sequence: Synthetic peptide
  N-term H or Acetyl
  MOD_RES (5)..(5): Tyr or Phospho-Tyr
  MOD_RES (7)..(7): Modified Cys
  See specification as filed for detailed description of substitutions and preferred embodiments
EDPEYICMG

SEQ ID NO: 313 - protein, 9 aa, Artificial Sequence
  Description of Artificial Sequence: Synthetic peptide
  N-term H or Acetyl
  MOD_RES (5)..(5): Tyr or Phospho-Tyr
  MOD_RES (7)..(7): Modified Cys
  See specification as filed for detailed description of substitutions and preferred embodiments
EDPEYICMK

SEQ ID NO: 314 - protein, 9 aa, Artificial Sequence
  Description of Artificial Sequence: Synthetic peptide
  N-term H or Acetyl
  MOD_RES (5)..(5): Tyr or Phospho-Tyr
  MOD_RES (7)..(7): Modified Cys
  See specification as filed for detailed description of substitutions and preferred embodiments
EDPEYICMP

SEQ ID NO: 315 - protein, 9 aa, Artificial Sequence
  Description of Artificial Sequence: Synthetic peptide
  N-term H or Acetyl
  MOD_RES (5)..(5): Tyr or Phospho-Tyr
  MOD_RES (7)..(7): Modified Cys
  See specification as filed for detailed description of substitutions and preferred embodiments
EDPEYICVG

SEQ ID NO: 316 - protein, 9 aa, Artificial Sequence
  Description of Artificial Sequence: Synthetic peptide
  N-term H or Acetyl
  MOD_RES (5)..(5): Tyr or Phospho-Tyr
  MOD_RES (7)..(7): Modified Cys
  See specification as filed for detailed description of substitutions and preferred embodiments
EDPEYICVK

SEQ ID NO: 317 - protein, 9 aa, Artificial Sequence
  Description of Artificial Sequence: Synthetic peptide
  N-term H or Acetyl
  MOD_RES (5)..(5): Tyr or Phospho-Tyr
  MOD_RES (7)..(7): Modified Cys
  See specification as filed for detailed description of substitutions and preferred embodiments
EDPEYICVP

SEQ ID NO: 318 - protein, 9 aa, Artificial Sequence
  Description of Artificial Sequence: Synthetic peptide
  N-term H or Acetyl
  MOD_RES (5)..(5): Tyr or Phospho-Tyr
  MOD_RES (7)..(7): Modified Cys
  See specification as filed for detailed description of substitutions and preferred embodiments
EDPEYVCFG

SEQ ID NO: 319 - protein, 9 aa, Artificial Sequence
  Description of Artificial Sequence: Synthetic peptide
  N-term H or Acetyl
  MOD_RES (5)..(5): Tyr or Phospho-Tyr
  MOD_RES (7)..(7): Modified Cys
  See specification as filed for detailed description of substitutions and preferred embodiments
EDPEYVCFK

SEQ ID NO: 320 - protein, 9 aa, Artificial Sequence
  Description of Artificial Sequence: Synthetic peptide
  N-term H or Acetyl
  MOD_RES (5)..(5): Tyr or Phospho-Tyr
  MOD_RES (7)..(7): Modified Cys
  See specification as filed for detailed description of substitutions and preferred embodiments
EDPEYVCFP

SEQ ID NO: 321 - protein, 9 aa, Artificial Sequence
  Description of Artificial Sequence: Synthetic peptide
  N-term H or Acetyl
  MOD_RES (5)..(5): Tyr or Phospho-Tyr
  MOD_RES (7)..(7): Modified Cys
  See specification as filed for detailed description of substitutions and preferred embodiments
EDPEYVCIG

SEQ ID NO: 322 - protein, 9 aa, Artificial Sequence
  Description of Artificial Sequence: Synthetic peptide
  N-term H or Acetyl
  MOD_RES (5)..(5): Tyr or Phospho-Tyr
  MOD_RES (7)..(7): Modified Cys
  See specification as filed for detailed description of substitutions and preferred embodiments
EDPEYVCIK

SEQ ID NO: 323 - protein, 9 aa, Artificial Sequence
  Description of Artificial Sequence: Synthetic peptide
  N-term H or Acetyl
  MOD_RES (5)..(5): Tyr or Phospho-Tyr
  MOD_RES (7)..(7): Modified Cys
  See specification as filed for detailed description of substitutions and preferred embodiments
EDPEYVCIP

SEQ ID NO: 324 - protein, 9 aa, Artificial Sequence
  Description of Artificial Sequence: Synthetic peptide
  N-term H or Acetyl
  MOD_RES (5)..(5): Tyr or Phospho-Tyr
  MOD_RES (7)..(7): Modified Cys
  See specification as filed for detailed description of substitutions and preferred embodiments
EDPEYVCMG

SEQ ID NO: 325 - protein, 9 aa, Artificial Sequence
  Description of Artificial Sequence: Synthetic peptide
  N-term H or Acetyl
  MOD_RES (5)..(5): Tyr or Phospho-Tyr
  MOD_RES (7)..(7): Modified Cys
  See specification as filed for detailed description of substitutions and preferred embodiments
EDPEYVCMK

SEQ ID NO: 326 - protein, 9 aa, Artificial Sequence
  Description of Artificial Sequence: Synthetic peptide
  N-term H or Acetyl
  MOD_RES (5)..(5): Tyr or Phospho-Tyr
  MOD_RES (7)..(7): Modified Cys
  See specification as filed for detailed description of substitutions and preferred embodiments
EDPEYVCMP

SEQ ID NO: 327 - protein, 9 aa, Artificial Sequence
  Description of Artificial Sequence: Synthetic peptide
  N-term H or Acetyl
  MOD_RES (5)..(5): Tyr or Phospho-Tyr
  MOD_RES (7)..(7): Modified Cys
  See specification as filed for detailed description of substitutions and preferred embodiments
EDPEYVCVG

SEQ ID NO: 328 - protein, 9 aa, Artificial Sequence
  Description of Artificial Sequence: Synthetic peptide
  N-term H or Acetyl
  MOD_RES (5)..(5): Tyr or Phospho-Tyr
  MOD_RES (7)..(7): Modified Cys
  See specification as filed for detailed description of substitutions and preferred embodiments
EDPEYVCVK

SEQ ID NO: 329 - protein, 9 aa, Artificial Sequence
  Description of Artificial Sequence: Synthetic peptide
  N-term H or Acetyl
  MOD_RES (5)..(5): Tyr or Phospho-Tyr
  MOD_RES (7)..(7): Modified Cys
  See specification as filed for detailed description of substitutions and preferred embodiments
EDPEYVCVP

SEQ ID NO: 330 - protein, 9 aa, Artificial Sequence
  Description of Artificial Sequence: Synthetic peptide
  N-term H or Acetyl
  MOD_RES (5)..(5): Tyr or Phospho-Tyr
  MOD_RES (7)..(7): Modified Cys
  See specification as filed for detailed description of substitutions and preferred embodiments
EDPIYFCFG

SEQ ID NO: 331 - protein, 9 aa, Artificial Sequence
  Description of Artificial Sequence: Synthetic peptide
  N-term H or Acetyl
  MOD_RES (5)..(5): Tyr or Phospho-Tyr
  MOD_RES (7)..(7): Modified Cys
  See specification as filed for detailed description of substitutions and preferred embodiments
EDPIYFCFK

SEQ ID NO: 332 - protein, 9 aa, Artificial Sequence
  Description of Artificial Sequence: Synthetic peptide
  N-term H or Acetyl
  MOD_RES (5)..(5): Tyr or Phospho-Tyr
  MOD_RES (7)..(7): Modified Cys
  See specification as filed for detailed description of substitutions and preferred embodiments
EDPIYFCFP

SEQ ID NO: 333 - protein, 9 aa, Artificial Sequence
  Description of Artificial Sequence: Synthetic peptide
  N-term H or Acetyl
  MOD_RES (5)..(5): Tyr or Phospho-Tyr
  MOD_RES (7)..(7): Modified Cys
  See specification as filed for detailed description of substitutions and preferred embodiments
EDPIYFCIG

SEQ ID NO: 334 - protein, 9 aa, Artificial Sequence
  Description of Artificial Sequence: Synthetic peptide
  N-term H or Acetyl
  MOD_RES (5)..(5): Tyr or Phospho-Tyr
  MOD_RES (7)..(7): Modified Cys
  See specification as filed for detailed description of substitutions and preferred embodiments
EDPIYFCIK

SEQ ID NO: 335 - protein, 9 aa, Artificial Sequence
  Description of Artificial Sequence: Synthetic peptide
  N-term H or Acetyl
  MOD_RES (5)..(5): Tyr or Phospho-Tyr
  MOD_RES (7)..(7): Modified Cys
  See specification as filed for detailed description of substitutions and preferred embodiments
EDPIYFCIP

SEQ ID NO: 336 - protein, 9 aa, Artificial Sequence
  Description of Artificial Sequence: Synthetic peptide
  N-term H or Acetyl
  MOD_RES (5)..(5): Tyr or Phospho-Tyr
  MOD_RES (7)..(7): Modified Cys
  See specification as filed for detailed description of substitutions and preferred embodiments
EDPIYFCMG

SEQ ID NO: 337 - protein, 9 aa, Artificial Sequence
  Description of Artificial Sequence: Synthetic peptide
  N-term H or Acetyl
  MOD_RES (5)..(5): Tyr or Phospho-Tyr
  MOD_RES (7)..(7): Modified Cys
  See specification as filed for detailed description of substitutions and preferred embodiments
EDPIYFCMK

SEQ ID NO: 338 - protein, 9 aa, Artificial Sequence
  Description of Artificial Sequence: Synthetic peptide
  N-term H or Acetyl
  MOD_RES (5)..(5): Tyr or Phospho-Tyr
  MOD_RES (7)..(7): Modified Cys
  See specification as filed for detailed description of substitutions and preferred embodiments
EDPIYFCMP

SEQ ID NO: 339 - protein, 9 aa, Artificial Sequence
  Description of Artificial Sequence: Synthetic peptide
  N-term H or Acetyl
  MOD_RES (5)..(5): Tyr or Phospho-Tyr
  MOD_RES (7)..(7): Modified Cys
  See specification as filed for detailed description of substitutions and preferred embodiments
EDPIYFCVG

SEQ ID NO: 340 - protein, 9 aa, Artificial Sequence
  Description of Artificial Sequence: Synthetic peptide
  N-term H or Acetyl
  MOD_RES (5)..(5): Tyr or Phospho-Tyr
  MOD_RES (7)..(7): Modified Cys
  See specification as filed for detailed description of substitutions and preferred embodiments
EDPIYFCVK

SEQ ID NO: 341 - protein, 9 aa, Artificial Sequence
  Description of Artificial Sequence: Synthetic peptide
  N-term H or Acetyl
  MOD_RES (5)..(5): Tyr or Phospho-Tyr
  MOD_RES (7)..(7): Modified Cys
  See specification as filed for detailed description of substitutions and preferred embodiments
EDPIYFCVP

SEQ ID NO: 342 - protein, 9 aa, Artificial Sequence
  Description of Artificial Sequence: Synthetic peptide
  N-term H or Acetyl
  MOD_RES (5)..(5): Tyr or Phospho-Tyr
  MOD_RES (7)..(7): Modified Cys
  See specification as filed for detailed description of substitutions and preferred embodiments
EDPIYICFG

SEQ ID NO: 343 - protein, 9 aa, Artificial Sequence
  Description of Artificial Sequence: Synthetic peptide
  N-term H or Acetyl
  MOD_RES (5)..(5): Tyr or Phospho-Tyr
  MOD_RES (7)..(7): Modified Cys
  See specification as filed for detailed description of substitutions and preferred embodiments
EDPIYICFK

SEQ ID NO: 344 - protein, 9 aa, Artificial Sequence
  Description of Artificial Sequence: Synthetic peptide
  N-term H or Acetyl
  MOD_RES (5)..(5): Tyr or Phospho-Tyr
  MOD_RES (7)..(7): Modified Cys
  See specification as filed for detailed description of substitutions and preferred embodiments
EDPIYICFP

SEQ ID NO: 345 - protein, 9 aa, Artificial Sequence
  Description of Artificial Sequence: Synthetic peptide
  N-term H or Acetyl
  MOD_RES (5)..(5): Tyr or Phospho-Tyr
  MOD_RES (7)..(7): Modified Cys
  See specification as filed for detailed description of substitutions and preferred embodiments
EDPIYICIG

SEQ ID NO: 346 - protein, 9 aa, Artificial Sequence
  Description of Artificial Sequence: Synthetic peptide
  N-term H or Acetyl
  MOD_RES (5)..(5): Tyr or Phospho-Tyr
  MOD_RES (7)..(7): Modified Cys
  See specification as filed for detailed description of substitutions and preferred embodiments
EDPIYICIK

SEQ ID NO: 347 - protein, 9 aa, Artificial Sequence
  Description of Artificial Sequence: Synthetic peptide
  N-term H or Acetyl
  MOD_RES (5)..(5): Tyr or Phospho-Tyr
  MOD_RES (7)..(7): Modified Cys
  See specification as filed for detailed description of substitutions and preferred embodiments
EDPIYICIP

SEQ ID NO: 348 - protein, 9 aa, Artificial Sequence
  Description of Artificial Sequence: Synthetic peptide
  N-term H or Acetyl
  MOD_RES (5)..(5): Tyr or Phospho-Tyr
  MOD_RES (7)..(7): Modified Cys
  See specification as filed for detailed description of substitutions and preferred embodiments
EDPIYICMG

SEQ ID NO: 349 - protein, 9 aa, Artificial Sequence
  Description of Artificial Sequence: Synthetic peptide
  N-term H or Acetyl
  MOD_RES (5)..(5): Tyr or Phospho-Tyr
  MOD_RES (7)..(7): Modified Cys
  See specification as filed for detailed description of substitutions and preferred embodiments
EDPIYICMK

SEQ ID NO: 350 - protein, 9 aa, Artificial Sequence
  Description of Artificial Sequence: Synthetic peptide
  N-term H or Acetyl
  MOD_RES (5)..(5): Tyr or Phospho-Tyr
  MOD_RES (7)..(7): Modified Cys
  See specification as filed for detailed description of substitutions and preferred embodiments
EDPIYICMP

SEQ ID NO: 351 - protein, 9 aa, Artificial Sequence
  Description of Artificial Sequence: Synthetic peptide
  N-term H or Acetyl
  MOD_RES (5)..(5): Tyr or Phospho-Tyr
  MOD_RES (7)..(7): Modified Cys
  See specification as filed for detailed description of substitutions and preferred embodiments
EDPIYICVG

SEQ ID NO: 352 - protein, 9 aa, Artificial Sequence
  Description of Artificial Sequence: Synthetic peptide
  N-term H or Acetyl
  MOD_RES (5)..(5): Tyr or Phospho-Tyr
  MOD_RES (7)..(7): Modified Cys
  See specification as filed for detailed description of substitutions and preferred embodiments
EDPIYICVK

SEQ ID NO: 353 - protein, 9 aa, Artificial Sequence
  Description of Artificial Sequence: Synthetic peptide
  N-term H or Acetyl
  MOD_RES (5)..(5): Tyr or Phospho-Tyr
  MOD_RES (7)..(7): Modified Cys
  See specification as filed for detailed description of substitutions and preferred embodiments
EDPIYICVP

SEQ ID NO: 354 - protein, 9 aa, Artificial Sequence
  Description of Artificial Sequence: Synthetic peptide
  N-term H or Acetyl
  MOD_RES (5)..(5): Tyr or Phospho-Tyr
  MOD_RES (7)..(7): Modified Cys
  See specification as filed for detailed description of substitutions and preferred embodiments
EDPIYVCFG

SEQ ID NO: 355 - protein, 9 aa, Artificial Sequence
  Description of Artificial Sequence: Synthetic peptide
  N-term H or Acetyl
  MOD_RES (5)..(5): Tyr or Phospho-Tyr
  MOD_RES (7)..(7): Modified Cys
  See specification as filed for detailed description of substitutions and preferred embodiments
EDPIYVCFK

SEQ ID NO: 356 - protein, 9 aa, Artificial Sequence
  Description of Artificial Sequence: Synthetic peptide
  N-term H or Acetyl
  MOD_RES (5)..(5): Tyr or Phospho-Tyr
  MOD_RES (7)..(7): Modified Cys
  See specification as filed for detailed description of substitutions and preferred embodiments
EDPIYVCFP

SEQ ID NO: 357 - protein, 9 aa, Artificial Sequence
  Description of Artificial Sequence: Synthetic peptide
  N-term H or Acetyl
  MOD_RES (5)..(5): Tyr or Phospho-Tyr
  MOD_RES (7)..(7): Modified Cys
  See specification as filed for detailed description of substitutions and preferred embodiments
EDPIYVCIG

SEQ ID NO: 358 - protein, 9 aa, Artificial Sequence
  Description of Artificial Sequence: Synthetic peptide
  N-term H or Acetyl
  MOD_RES (5)..(5): Tyr or Phospho-Tyr
  MOD_RES (7)..(7): Modified Cys
  See specification as filed for detailed description of substitutions and preferred embodiments
EDPIYVCIK

SEQ ID NO: 359 - protein, 9 aa, Artificial Sequence
  Description of Artificial Sequence: Synthetic peptide
  N-term H or Acetyl
  MOD_RES (5)..(5): Tyr or Phospho-Tyr
  MOD_RES (7)..(7): Modified Cys
  See specification as filed for detailed description of substitutions and preferred embodiments
EDPIYVCIP

SEQ ID NO: 360 - protein, 9 aa, Artificial Sequence
  Description of Artificial Sequence: Synthetic peptide
  N-term H or Acetyl
  MOD_RES (5)..(5): Tyr or Phospho-Tyr
  MOD_RES (7)..(7): Modified Cys
  See specification as filed for detailed description of substitutions and preferred embodiments
EDPIYVCMG

SEQ ID NO: 361 - protein, 9 aa, Artificial Sequence
  Description of Artificial Sequence: Synthetic peptide
  N-term H or Acetyl
  MOD_RES (5)..(5): Tyr or Phospho-Tyr
  MOD_RES (7)..(7): Modified Cys
  See specification as filed for detailed description of substitutions and preferred embodiments
EDPIYVCMK

SEQ ID NO: 362 - protein, 9 aa, Artificial Sequence
  Description of Artificial Sequence: Synthetic peptide
  N-term H or Acetyl
  MOD_RES (5)..(5): Tyr or Phospho-Tyr
  MOD_RES (7)..(7): Modified Cys
  See specification as filed for detailed description of substitutions and preferred embodiments
EDPIYVCMP

SEQ ID NO: 363 - protein, 9 aa, Artificial Sequence
  Description of Artificial Sequence: Synthetic peptide
  N-term H or Acetyl
  MOD_RES (5)..(5): Tyr or Phospho-Tyr
  MOD_RES (7)..(7): Modified Cys
  See specification as filed for detailed description of substitutions and preferred embodiments
EDPIYVCVG

SEQ ID NO: 364 - protein, 9 aa, Artificial Sequence
  Description of Artificial Sequence: Synthetic peptide
  N-term H or Acetyl
  MOD_RES (5)..(5): Tyr or Phospho-Tyr
  MOD_RES (7)..(7): Modified Cys
  See specification as filed for detailed description of substitutions and preferred embodiments
EDPIYVCVK

SEQ ID NO: 365 - protein, 9 aa, Artificial Sequence
  Description of Artificial Sequence: Synthetic peptide
  N-term H or Acetyl
  MOD_RES (5)..(5): Tyr or Phospho-Tyr
  MOD_RES (7)..(7): Modified Cys
  See specification as filed for detailed description of substitutions and preferred embodiments
EDPIYVCVP

SEQ ID NO: 366 - protein, 9 aa, Artificial Sequence
  Description of Artificial Sequence: Synthetic peptide
  N-term H or Acetyl
  MOD_RES (5)..(5): Tyr or Phospho-Tyr
  MOD_RES (7)..(7): Modified Cys
  See specification as filed for detailed description of substitutions and preferred embodiments
EEPDYFCFG

SEQ ID NO: 367 - protein, 9 aa, Artificial Sequence
  Description of Artificial Sequence: Synthetic peptide
  N-term H or Acetyl
  MOD_RES (5)..(5): Tyr or Phospho-Tyr
  MOD_RES (7)..(7): Modified Cys
  See specification as filed for detailed description of substitutions and preferred embodiments
EEPDYFCFK

SEQ ID NO: 368 - protein, 9 aa, Artificial Sequence
  Description of Artificial Sequence: Synthetic peptide
  N-term H or Acetyl
  MOD_RES (5)..(5): Tyr or Phospho-Tyr
  MOD_RES (7)..(7): Modified Cys
  See specification as filed for detailed description of substitutions and preferred embodiments
EEPDYFCFP

SEQ ID NO: 369 - protein, 9 aa, Artificial Sequence
  Description of Artificial Sequence: Synthetic peptide
  N-term H or Acetyl
  MOD_RES (5)..(5): Tyr or Phospho-Tyr
  MOD_RES (7)..(7): Modified Cys
  See specification as filed for detailed description of substitutions and preferred embodiments
EEPDYFCIG

SEQ ID NO: 370 - protein, 9 aa, Artificial Sequence
  Description of Artificial Sequence: Synthetic peptide
  N-term H or Acetyl
  MOD_RES (5)..(5): Tyr or Phospho-Tyr
  MOD_RES (7)..(7): Modified Cys
  See specification as filed for detailed description of substitutions and preferred embodiments
EEPDYFCIK

SEQ ID NO: 371 - protein, 9 aa, Artificial Sequence
  Description of Artificial Sequence: Synthetic peptide
  N-term H or Acetyl
  MOD_RES (5)..(5): Tyr or Phospho-Tyr
  MOD_RES (7)..(7): Modified Cys
  See specification as filed for detailed description of substitutions and preferred embodiments
EEPDYFCIP

SEQ ID NO: 372 - protein, 9 aa, Artificial Sequence
  Description of Artificial Sequence: Synthetic peptide
  N-term H or Acetyl
  MOD_RES (5)..(5): Tyr or Phospho-Tyr
  MOD_RES (7)..(7): Modified Cys
  See specification as filed for detailed description of substitutions and preferred embodiments
EEPDYFCMG

SEQ ID NO: 373 - protein, 9 aa, Artificial Sequence
  Description of Artificial Sequence: Synthetic peptide
  N-term H or Acetyl
  MOD_RES (5)..(5): Tyr or Phospho-Tyr
  MOD_RES (7)..(7): Modified Cys
  See specification as filed for detailed description of substitutions and preferred embodiments
EEPDYFCMK

SEQ ID NO: 374 - protein, 9 aa, Artificial Sequence
  Description of Artificial Sequence: Synthetic peptide
  N-term H or Acetyl
  MOD_RES (5)..(5): Tyr or Phospho-Tyr
  MOD_RES (7)..(7): Modified Cys
  See specification as filed for detailed description of substitutions and preferred embodiments
EEPDYFCMP

SEQ ID NO: 375 - protein, 9 aa, Artificial Sequence
  Description of Artificial Sequence: Synthetic peptide
  N-term H or Acetyl
  MOD_RES (5)..(5): Tyr or Phospho-Tyr
  MOD_RES (7)..(7): Modified Cys
  See specification as filed for detailed description of substitutions and preferred embodiments
EEPDYFCVG

SEQ ID NO: 376 - protein, 9 aa, Artificial Sequence
  Description of Artificial Sequence: Synthetic peptide
  N-term H or Acetyl
  MOD_RES (5)..(5): Tyr or Phospho-Tyr
  MOD_RES (7)..(7): Modified Cys
  See specification as filed for detailed description of substitutions and preferred embodiments
EEPDYFCVK

SEQ ID NO: 377 - protein, 9 aa, Artificial Sequence
  Description of Artificial Sequence: Synthetic peptide
  N-term H or Acetyl
  MOD_RES (5)..(5): Tyr or Phospho-Tyr
  MOD_RES (7)..(7): Modified Cys
  See specification as filed for detailed description of substitutions and preferred embodiments
EEPDYFCVP

SEQ ID NO: 378 - protein, 9 aa, Artificial Sequence
  Description of Artificial Sequence: Synthetic peptide
  N-term H or Acetyl
  MOD_RES (5)..(5): Tyr or Phospho-Tyr
  MOD_RES (7)..(7): Modified Cys
  See specification as filed for detailed description of substitutions and preferred embodiments
EEPDYICFG

SEQ ID NO: 379 - protein, 9 aa, Artificial Sequence
  Description of Artificial Sequence: Synthetic peptide
  N-term H or Acetyl
  MOD_RES (5)..(5): Tyr or Phospho-Tyr
  MOD_RES (7)..(7): Modified Cys
  See specification as filed for detailed description of substitutions and preferred embodiments
EEPDYICFK

SEQ ID NO: 380 - protein, 9 aa, Artificial Sequence
  Description of Artificial Sequence: Synthetic peptide
  N-term H or Acetyl
  MOD_RES (5)..(5): Tyr or Phospho-Tyr
  MOD_RES (7)..(7): Modified Cys
  See specification as filed for detailed description of substitutions and preferred embodiments
EEPDYICFP

SEQ ID NO: 381 - protein, 9 aa, Artificial Sequence
  Description of Artificial Sequence: Synthetic peptide
  N-term H or Acetyl
  MOD_RES (5)..(5): Tyr or Phospho-Tyr
  MOD_RES (7)..(7): Modified Cys
  See specification as filed for detailed description of substitutions and preferred embodiments
EEPDYICIG

SEQ ID NO: 382 - protein, 9 aa, Artificial Sequence
  Description of Artificial Sequence: Synthetic peptide
  N-term H or Acetyl
  MOD_RES (5)..(5): Tyr or Phospho-Tyr
  MOD_RES (7)..(7): Modified Cys
  See specification as filed for detailed description of substitutions and preferred embodiments
EEPDYICIK

SEQ ID NO: 383 - protein, 9 aa, Artificial Sequence
  Description of Artificial Sequence: Synthetic peptide
  N-term H or Acetyl
  MOD_RES (5)..(5): Tyr or Phospho-Tyr
  MOD_RES (7)..(7): Modified Cys
  See specification as filed for detailed description of substitutions and preferred embodiments
EEPDYICIP

SEQ ID NO: 384 - protein, 9 aa, Artificial Sequence
  Description of Artificial Sequence: Synthetic peptide
  N-term H or Acetyl
  MOD_RES (5)..(5): Tyr or Phospho-Tyr
  MOD_RES (7)..(7): Modified Cys
  See specification as filed for detailed description of substitutions and preferred embodiments
EEPDYICMG

SEQ ID NO: 385 - protein, 9 aa, Artificial Sequence
  Description of Artificial Sequence: Synthetic peptide
  N-term H or Acetyl
  MOD_RES (5)..(5): Tyr or Phospho-Tyr
  MOD_RES (7)..(7): Modified Cys
  See specification as filed for detailed description of substitutions and preferred embodiments
EEPDYICMK

SEQ ID NO: 386 - protein, 9 aa, Artificial Sequence
  Description of Artificial Sequence: Synthetic peptide
  N-term H or Acetyl
  MOD_RES (5)..(5): Tyr or Phospho-Tyr
  MOD_RES (7)..(7): Modified Cys
  See specification as filed for detailed description of substitutions and preferred embodiments
EEPDYICMP

SEQ ID NO: 387 - protein, 9 aa, Artificial Sequence
  Description of Artificial Sequence: Synthetic peptide
  N-term H or Acetyl
  MOD_RES (5)..(5): Tyr or Phospho-Tyr
  MOD_RES (7)..(7): Modified Cys
  See specification as filed for detailed description of substitutions and preferred embodiments
EEPDYICVG

SEQ ID NO: 388 - protein, 9 aa, Artificial Sequence
  Description of Artificial Sequence: Synthetic peptide
  N-term H or Acetyl
  MOD_RES (5)..(5): Tyr or Phospho-Tyr
  MOD_RES (7)..(7): Modified Cys
  See specification as filed for detailed description of substitutions and preferred embodiments
EEPDYICVK

SEQ ID NO: 389 - protein, 9 aa, Artificial Sequence
  Description of Artificial Sequence: Synthetic peptide
  N-term H or Acetyl
  MOD_RES (5)..(5): Tyr or Phospho-Tyr
  MOD_RES (7)..(7): Modified Cys
  See specification as filed for detailed description of substitutions and preferred embodiments
EEPDYICVP

SEQ ID NO: 390 - protein, 9 aa, Artificial Sequence
  Description of Artificial Sequence: Synthetic peptide
  N-term H or Acetyl
  MOD_RES (5)..(5): Tyr or Phospho-Tyr
  MOD_RES (7)..(7): Modified Cys
  See specification as filed for detailed description of substitutions and preferred embodiments
EEPDYVCFG

SEQ ID NO: 391 - protein, 9 aa, Artificial Sequence
  Description of Artificial Sequence: Synthetic peptide
  N-term H or Acetyl
  MOD_RES (5)..(5): Tyr or Phospho-Tyr
  MOD_RES (7)..(7): Modified Cys
  See specification as filed for detailed description of substitutions and preferred embodiments
EEPDYVCFK

SEQ ID NO: 392 - protein, 9 aa, Artificial Sequence
  Description of Artificial Sequence: Synthetic peptide
  N-term H or Acetyl
  MOD_RES (5)..(5): Tyr or Phospho-Tyr
  MOD_RES (7)..(7): Modified Cys
  See specification as filed for detailed description of substitutions and preferred embodiments
EEPDYVCFP

SEQ ID NO: 393 - protein, 9 aa, Artificial Sequence
  Description of Artificial Sequence: Synthetic peptide
  N-term H or Acetyl
  MOD_RES (5)..(5): Tyr or Phospho-Tyr
  MOD_RES (7)..(7): Modified Cys
  See specification as filed for detailed description of substitutions and preferred embodiments
EEPDYVCIG

SEQ ID NO: 394 - protein, 9 aa, Artificial Sequence
  Description of Artificial Sequence: Synthetic peptide
  N-term H or Acetyl
  MOD_RES (5)..(5): Tyr or Phospho-Tyr
  MOD_RES (7)..(7): Modified Cys
  See specification as filed for detailed description of substitutions and preferred embodiments
EEPDYVCIK

SEQ ID NO: 395 - protein, 9 aa, Artificial Sequence
  Description of Artificial Sequence: Synthetic peptide
  N-term H or Acetyl
  MOD_RES (5)..(5): Tyr or Phospho-Tyr
  MOD_RES (7)..(7): Modified Cys
  See specification as filed for detailed description of substitutions and preferred embodiments
EEPDYVCIP

SEQ ID NO: 396 - protein, 9 aa, Artificial Sequence
  Description of Artificial Sequence: Synthetic peptide
  N-term H or Acetyl
  MOD_RES (5)..(5): Tyr or Phospho-Tyr
  MOD_RES (7)..(7): Modified Cys
  See specification as filed for detailed description of substitutions and preferred embodiments
EEPDYVCMG

SEQ ID NO: 397 - protein, 9 aa, Artificial Sequence
  Description of Artificial Sequence: Synthetic peptide
  N-term H or Acetyl
  MOD_RES (5)..(5): Tyr or Phospho-Tyr
  MOD_RES (7)..(7): Modified Cys
  See specification as filed for detailed description of substitutions and preferred embodiments
EEPDYVCMK

SEQ ID NO: 398 - protein, 9 aa, Artificial Sequence
  Description of Artificial Sequence: Synthetic peptide
  N-term H or Acetyl
  MOD_RES (5)..(5): Tyr or Phospho-Tyr
  MOD_RES (7)..(7): Modified Cys
  See specification as filed for detailed description of substitutions and preferred embodiments
EEPDYVCMP

SEQ ID NO: 399 - protein, 9 aa, Artificial Sequence
  Description of Artificial Sequence: Synthetic peptide
  N-term H or Acetyl
  MOD_RES (5)..(5): Tyr or Phospho-Tyr
  MOD_RES (7)..(7): Modified Cys
  See specification as filed for detailed description of substitutions and preferred embodiments
EEPDYVCVG

SEQ ID NO: 400 - protein, 9 aa, Artificial Sequence
  Description of Artificial Sequence: Synthetic peptide
  N-term H or Acetyl
  MOD_RES (5)..(5): Tyr or Phospho-Tyr
  MOD_RES (7)..(7): Modified Cys
  See specification as filed for detailed description of substitutions and preferred embodiments
EEPDYVCVK

SEQ ID NO: 401 - protein, 9 aa, Artificial Sequence
  Description of Artificial Sequence: Synthetic peptide
  N-term H or Acetyl
  MOD_RES (5)..(5): Tyr or Phospho-Tyr
  MOD_RES (7)..(7): Modified Cys
  See specification as filed for detailed description of substitutions and preferred embodiments
EEPDYVCVP

SEQ ID NO: 402 - protein, 9 aa, Artificial Sequence
  Description of Artificial Sequence: Synthetic peptide
  N-term H or Acetyl
  MOD_RES (5)..(5): Tyr or Phospho-Tyr
  MOD_RES (7)..(7): Modified Cys
  See specification as filed for detailed description of substitutions and preferred embodiments
EEPEYFCFG

SEQ ID NO: 403 - protein, 9 aa, Artificial Sequence
  Description of Artificial Sequence: Synthetic peptide
  N-term H or Acetyl
  MOD_RES (5)..(5): Tyr or Phospho-Tyr
  MOD_RES (7)..(7): Modified Cys
  See specification as filed for detailed description of substitutions and preferred embodiments
EEPEYFCFK

SEQ ID NO: 404 - protein, 9 aa, Artificial Sequence
  Description of Artificial Sequence: Synthetic peptide
  N-term H or Acetyl
  MOD_RES (5)..(5): Tyr or Phospho-Tyr
  MOD_RES (7)..(7): Modified Cys
  See specification as filed for detailed description of substitutions and preferred embodiments
EEPEYFCFP

SEQ ID NO: 405 - protein, 9 aa, Artificial Sequence
  Description of Artificial Sequence: Synthetic peptide
  N-term H or Acetyl
  MOD_RES (5)..(5): Tyr or Phospho-Tyr
  MOD_RES (7)..(7): Modified Cys
  See specification as filed for detailed description of substitutions and preferred embodiments
EEPEYFCIG

SEQ ID NO: 406 - protein, 9 aa, Artificial Sequence
  Description of Artificial Sequence: Synthetic peptide
  N-term H or Acetyl
  MOD_RES (5)..(5): Tyr or Phospho-Tyr
  MOD_RES (7)..(7): Modified Cys
  See specification as filed for detailed description of substitutions and preferred embodiments
EEPEYFCIK

SEQ ID NO: 407 - protein, 9 aa, Artificial Sequence
  Description of Artificial Sequence: Synthetic peptide
  N-term H or Acetyl
  MOD_RES (5)..(5): Tyr or Phospho-Tyr
  MOD_RES (7)..(7): Modified Cys
  See specification as filed for detailed description of substitutions and preferred embodiments
EEPEYFCIP

SEQ ID NO: 408 - protein, 9 aa, Artificial Sequence
  Description of Artificial Sequence: Synthetic peptide
  N-term H or Acetyl
  MOD_RES (5)..(5): Tyr or Phospho-Tyr
  MOD_RES (7)..(7): Modified Cys
  See specification as filed for detailed description of substitutions and preferred embodiments
EEPEYFCMG

SEQ ID NO: 409 - protein, 9 aa, Artificial Sequence
  Description of Artificial Sequence: Synthetic peptide
  N-term H or Acetyl
  MOD_RES (5)..(5): Tyr or Phospho-Tyr
  MOD_RES (7)..(7): Modified Cys
  See specification as filed for detailed description of substitutions and preferred embodiments
EEPEYFCMK

SEQ ID NO: 410 - protein, 9 aa, Artificial Sequence
  Description of Artificial Sequence: Synthetic peptide
  N-term H or Acetyl
  MOD_RES (5)..(5): Tyr or Phospho-Tyr
  MOD_RES (7)..(7): Modified Cys
  See specification as filed for detailed description of substitutions and preferred embodiments
EEPEYFCMP

SEQ ID NO: 411 - protein, 9 aa, Artificial Sequence
  Description of Artificial Sequence: Synthetic peptide
  N-term H or Acetyl
  MOD_RES (5)..(5): Tyr or Phospho-Tyr
  MOD_RES (7)..(7): Modified Cys
  See specification as filed for detailed description of substitutions and preferred embodiments
EEPEYFCVG

SEQ ID NO: 412 - protein, 9 aa, Artificial Sequence
  Description of Artificial Sequence: Synthetic peptide
  N-term H or Acetyl
  MOD_RES (5)..(5): Tyr or Phospho-Tyr
  MOD_RES (7)..(7): Modified Cys
  See specification as filed for detailed description of substitutions and preferred embodiments
EEPEYFCVK

SEQ ID NO: 413 - protein, 9 aa, Artificial Sequence
  Description of Artificial Sequence: Synthetic peptide
  N-term H or Acetyl
  MOD_RES (5)..(5): Tyr or Phospho-Tyr
  MOD_RES (7)..(7): Modified Cys
  See specification as filed for detailed description of substitutions and preferred embodiments
EEPEYFCVP

SEQ ID NO: 414 - protein, 9 aa, Artificial Sequence
  Description of Artificial Sequence: Synthetic peptide
  N-term H or Acetyl
  MOD_RES (5)..(5): Tyr or Phospho-Tyr
  MOD_RES (7)..(7): Modified Cys
  See specification as filed for detailed description of substitutions and preferred embodiments
EEPEYICFG

SEQ ID NO: 415 - protein, 9 aa, Artificial Sequence
  Description of Artificial Sequence: Synthetic peptide
  N-term H or Acetyl
  MOD_RES (5)..(5): Tyr or Phospho-Tyr
  MOD_RES (7)..(7): Modified Cys
  See specification as filed for detailed description of substitutions and preferred embodiments
EEPEYICFK

SEQ ID NO: 416 - protein, 9 aa, Artificial Sequence
  Description of Artificial Sequence: Synthetic peptide
  N-term H or Acetyl
  MOD_RES (5)..(5): Tyr or Phospho-Tyr
  MOD_RES (7)..(7): Modified Cys
  See specification as filed for detailed description of substitutions and preferred embodiments
EEPEYICFP

SEQ ID NO: 417 - protein, 9 aa, Artificial Sequence
  Description of Artificial Sequence: Synthetic peptide
  N-term H or Acetyl
  MOD_RES (5)..(5): Tyr or Phospho-Tyr
  MOD_RES (7)..(7): Modified Cys
  See specification as filed for detailed description of substitutions and preferred embodiments
EEPEYICIG

SEQ ID NO: 418 - protein, 9 aa, Artificial Sequence
  Description of Artificial Sequence: Synthetic peptide
  N-term H or Acetyl
  MOD_RES (5)..(5): Tyr or Phospho-Tyr
  MOD_RES (7)..(7): Modified Cys
  See specification as filed for detailed description of substitutions and preferred embodiments
EEPEYICIK

SEQ ID NO: 419 - protein, 9 aa, Artificial Sequence
  Description of Artificial Sequence: Synthetic peptide
  N-term H or Acetyl
  MOD_RES (5)..(5): Tyr or Phospho-Tyr
  MOD_RES (7)..(7): Modified Cys
  See specification as filed for detailed description of substitutions and preferred embodiments
EEPEYICIP

SEQ ID NO: 420 - protein, 9 aa, Artificial Sequence
  Description of Artificial Sequence: Synthetic peptide
  N-term H or Acetyl
  MOD_RES (5)..(5): Tyr or Phospho-Tyr
  MOD_RES (7)..(7): Modified Cys
  See specification as filed for detailed description of substitutions and preferred embodiments
EEPEYICMG

SEQ ID NO: 421 - protein, 9 aa, Artificial Sequence
  Description of Artificial Sequence: Synthetic peptide
  N-term H or Acetyl
  MOD_RES (5)..(5): Tyr or Phospho-Tyr
  MOD_RES (7)..(7): Modified Cys
  See specification as filed for detailed description of substitutions and preferred embodiments
EEPEYICMK

SEQ ID NO: 422 - protein, 9 aa, Artificial Sequence
  Description of Artificial Sequence: Synthetic peptide
  N-term H or Acetyl
  MOD_RES (5)..(5): Tyr or Phospho-Tyr
  MOD_RES (7)..(7): Modified Cys
  See specification as filed for detailed description of substitutions and preferred embodiments
EEPEYICMP

SEQ ID NO: 423 - protein, 9 aa, Artificial Sequence
  Description of Artificial Sequence: Synthetic peptide
  N-term H or Acetyl
  MOD_RES (5)..(5): Tyr or Phospho-Tyr
  MOD_RES (7)..(7): Modified Cys
  See specification as filed for detailed description of substitutions and preferred embodiments
EEPEYICVG

SEQ ID NO: 424 - protein, 9 aa, Artificial Sequence
  Description of Artificial Sequence: Synthetic peptide
  N-term H or Acetyl
  MOD_RES (5)..(5): Tyr or Phospho-Tyr
  MOD_RES (7)..(7): Modified Cys
  See specification as filed for detailed description of substitutions and preferred embodiments
EEPEYICVK

SEQ ID NO: 425 - protein, 9 aa, Artificial Sequence
  Description of Artificial Sequence: Synthetic peptide
  N-term H or Acetyl
  MOD_RES (5)..(5): Tyr or Phospho-Tyr
  MOD_RES (7)..(7): Modified Cys
  See specification as filed for detailed description of substitutions and preferred embodiments
EEPEYICVP

SEQ ID NO: 426 - protein, 9 aa, Artificial Sequence
  Description of Artificial Sequence: Synthetic peptide
  N-term H or Acetyl
  MOD_RES (5)..(5): Tyr or Phospho-Tyr
  MOD_RES (7)..(7): Modified Cys
  See specification as filed for detailed description of substitutions and preferred embodiments
EEPEYVCFG

SEQ ID NO: 427 - protein, 9 aa, Artificial Sequence
  Description of Artificial Sequence: Synthetic peptide
  N-term H or Acetyl
  MOD_RES (5)..(5): Tyr or Phospho-Tyr
  MOD_RES (7)..(7): Modified Cys
  See specification as filed for detailed description of substitutions and preferred embodiments
EEPEYVCFK

SEQ ID NO: 428 - protein, 9 aa, Artificial Sequence
  Description of Artificial Sequence: Synthetic peptide
  N-term H or Acetyl
  MOD_RES (5)..(5): Tyr or Phospho-Tyr
  MOD_RES (7)..(7): Modified Cys
  See specification as filed for detailed description of substitutions and preferred embodiments
EEPEYVCFP

SEQ ID NO: 429 - protein, 9 aa, Artificial Sequence
  Description of Artificial Sequence: Synthetic peptide
  N-term H or Acetyl
  MOD_RES (5)..(5): Tyr or Phospho-Tyr
  MOD_RES (7)..(7): Modified Cys
  See specification as filed for detailed description of substitutions and preferred embodiments
EEPEYVCIG

SEQ ID NO: 430 - protein, 9 aa, Artificial Sequence
  Description of Artificial Sequence: Synthetic peptide
  N-term H or Acetyl
  MOD_RES (5)..(5): Tyr or Phospho-Tyr
  MOD_RES (7)..(7): Modified Cys
  See specification as filed for detailed description of substitutions and preferred embodiments
EEPEYVCIK

SEQ ID NO: 431 - protein, 9 aa, Artificial Sequence
  Description of Artificial Sequence: Synthetic peptide
  N-term H or Acetyl
  MOD_RES (5)..(5): Tyr or Phospho-Tyr
  MOD_RES (7)..(7): Modified Cys
  See specification as filed for detailed description of substitutions and preferred embodiments
EEPEYVCIP

SEQ ID NO: 432 - protein, 9 aa, Artificial Sequence
  Description of Artificial Sequence: Synthetic peptide
  N-term H or Acetyl
  MOD_RES (5)..(5): Tyr or Phospho-Tyr
  MOD_RES (7)..(7): Modified Cys
  See specification as filed for detailed description of substitutions and preferred embodiments
EEPEYVCMG

SEQ ID NO: 433 - protein, 9 aa, Artificial Sequence
  Description of Artificial Sequence: Synthetic peptide
  N-term H or Acetyl
  MOD_RES (5)..(5): Tyr or Phospho-Tyr
  MOD_RES (7)..(7): Modified Cys
  See specification as filed for detailed description of substitutions and preferred embodiments
EEPEYVCMK

SEQ ID NO: 434 - protein, 9 aa, Artificial Sequence
  Description of Artificial Sequence: Synthetic peptide
  N-term H or Acetyl
  MOD_RES (5)..(5): Tyr or Phospho-Tyr
  MOD_RES (7)..(7): Modified Cys
  See specification as filed for detailed description of substitutions and preferred embodiments
EEPEYVCMP

SEQ ID NO: 435 - protein, 9 aa, Artificial Sequence
  Description of Artificial Sequence: Synthetic peptide
  N-term H or Acetyl
  MOD_RES (5)..(5): Tyr or Phospho-Tyr
  MOD_RES (7)..(7): Modified Cys
  See specification as filed for detailed description of substitutions and preferred embodiments
EEPEYVCVG

SEQ ID NO: 436 - protein, 9 aa, Artificial Sequence
  Description of Artificial Sequence: Synthetic peptide
  N-term H or Acetyl
  MOD_RES (5)..(5): Tyr or Phospho-Tyr
  MOD_RES (7)..(7): Modified Cys
  See specification as filed for detailed description of substitutions and preferred embodiments
EEPEYVCVK

SEQ ID NO: 437 - protein, 9 aa, Artificial Sequence
  Description of Artificial Sequence: Synthetic peptide
  N-term H or Acetyl
  MOD_RES (5)..(5): Tyr or Phospho-Tyr
  MOD_RES (7)..(7): Modified Cys
  See specification as filed for detailed description of substitutions and preferred embodiments
EEPEYVCVP

SEQ ID NO: 438 - protein, 9 aa, Artificial Sequence
  Description of Artificial Sequence: Synthetic peptide
  N-term H or Acetyl
  MOD_RES (5)..(5): Tyr or Phospho-Tyr
  MOD_RES (7)..(7): Modified Cys
  MOD_RES (8)..(8): Leu or Nle (i.e. isomer of Leucine)
  See specification as filed for detailed description of substitutions and preferred embodiments
EEPIYACLK

SEQ ID NO: 439 - protein, 9 aa, Artificial Sequence
  Description of Artificial Sequence: Synthetic peptide
  N-term H or Acetyl
  MOD_RES (5)..(5): Tyr or Phospho-Tyr
  MOD_RES (7)..(7): Modified Cys
  MOD_RES (8)..(8): Leu or Nle (i.e. isomer of Leucine)
  See specification as filed for detailed description of substitutions and preferred embodiments
EEPIYACLM

SEQ ID NO: 440 - protein, 9 aa, Artificial Sequence
  Description of Artificial Sequence: Synthetic peptide
  N-term H or Acetyl
  MOD_RES (5)..(5): Tyr or Phospho-Tyr
  MOD_RES (7)..(7): Modified Cys
  MOD_RES (8)..(8): Leu or Nle (i.e. isomer of Leucine)
  See specification as filed for detailed description of substitutions and preferred embodiments
EEPIYACLP

SEQ ID NO: 441 - protein, 9 aa, Artificial Sequence
  Description of Artificial Sequence: Synthetic peptide
  N-term H or Acetyl
  MOD_RES (5)..(5): Tyr or Phospho-Tyr
  MOD_RES (7)..(7): Modified Cys
  See specification as filed for detailed description of substitutions and preferred embodiments
EEPIYACFK

SEQ ID NO: 442 - protein, 9 aa, Artificial Sequence
  Description of Artificial Sequence: Synthetic peptide
  N-term H or Acetyl
  MOD_RES (5)..(5): Tyr or Phospho-Tyr
  MOD_RES (7)..(7): Modified Cys
  See specification as filed for detailed description of substitutions and preferred embodiments
EEPIYACFM

SEQ ID NO: 443 - protein, 9 aa, Artificial Sequence
  Description of Artificial Sequence: Synthetic peptide
  N-term H or Acetyl
  MOD_RES (5)..(5): Tyr or Phospho-Tyr
  MOD_RES (7)..(7): Modified Cys
  See specification as filed for detailed description of substitutions and preferred embodiments
EEPIYACFP

SEQ ID NO: 444 - protein, 9 aa, Artificial Sequence
  Description of Artificial Sequence: Synthetic peptide
  N-term H or Acetyl
  MOD_RES (5)..(5): Tyr or Phospho-Tyr
  MOD_RES (7)..(7): Modified Cys
  See specification as filed for detailed description of substitutions and preferred embodiments
EEPIYACIK

SEQ ID NO: 445 - protein, 9 aa, Artificial Sequence
  Description of Artificial Sequence: Synthetic peptide
  N-term H or Acetyl
  MOD_RES (5)..(5): Tyr or Phospho-Tyr
  MOD_RES (7)..(7): Modified Cys
  See specification as filed for detailed description of substitutions and preferred embodiments
EEPIYACIM

SEQ ID NO: 446 - protein, 9 aa, Artificial Sequence
  Description of Artificial Sequence: Synthetic peptide
  N-term H or Acetyl
  MOD_RES (5)..(5): Tyr or Phospho-Tyr
  MOD_RES (7)..(7): Modified Cys
  See specification as filed for detailed description of substitutions and preferred embodiments
EEPIYACIP

SEQ ID NO: 447 - protein, 9 aa, Artificial Sequence
  Description of Artificial Sequence: Synthetic peptide
  N-term H or Acetyl
  MOD_RES (5)..(5): Tyr or Phospho-Tyr
  MOD_RES (7)..(7): Modified Cys
  See specification as filed for detailed description of substitutions and preferred embodiments
EEPIYACLK

SEQ ID NO: 448 - protein, 9 aa, Artificial Sequence
  Description of Artificial Sequence: Synthetic peptide
  N-term H or Acetyl
  MOD_RES (5)..(5): Tyr or Phospho-Tyr
  MOD_RES (7)..(7): Modified Cys
  See specification as filed for detailed description of substitutions and preferred embodiments
EEPIYACLM

SEQ ID NO: 449 - protein, 9 aa, Artificial Sequence
  Description of Artificial Sequence: Synthetic peptide
  N-term H or Acetyl
  MOD_RES (5)..(5): Tyr or Phospho-Tyr
  MOD_RES (7)..(7): Modified Cys
  See specification as filed for detailed description of substitutions and preferred embodiments
EEPIYACLP

SEQ ID NO: 450 - protein, 9 aa, Artificial Sequence
  Description of Artificial Sequence: Synthetic peptide
  N-term H or Acetyl
  MOD_RES (5)..(5): Tyr or Phospho-Tyr
  MOD_RES (7)..(7): Modified Cys
  See specification as filed for detailed description of substitutions and preferred embodiments
EEPIYACMK

SEQ ID NO: 451 - protein, 9 aa, Artificial Sequence
  Description of Artificial Sequence: Synthetic peptide
  N-term H or Acetyl
  MOD_RES (5)..(5): Tyr or Phospho-Tyr
  MOD_RES (7)..(7): Modified Cys
  See specification as filed for detailed description of substitutions and preferred embodiments
EEPIYACMM

SEQ ID NO: 452 - protein, 9 aa, Artificial Sequence
  Description of Artificial Sequence: Synthetic peptide
  N-term H or Acetyl
  MOD_RES (5)..(5): Tyr or Phospho-Tyr
  MOD_RES (7)..(7): Modified Cys
  See specification as filed for detailed description of substitutions and preferred embodiments
EEPIYACMP

SEQ ID NO: 453 - protein, 9 aa, Artificial Sequence
  Description of Artificial Sequence: Synthetic peptide
  N-term H or Acetyl
  MOD_RES (5)..(5): Tyr or Phospho-Tyr
  MOD_RES (7)..(7): Modified Cys
  See specification as filed for detailed description of substitutions and preferred embodiments
EEPIYACVK

SEQ ID NO: 454 - protein, 9 aa, Artificial Sequence
  Description of Artificial Sequence: Synthetic peptide
  N-term H or Acetyl
  MOD_RES (5)..(5): Tyr or Phospho-Tyr
  MOD_RES (7)..(7): Modified Cys
  See specification as filed for detailed description of substitutions and preferred embodiments
EEPIYACVM

SEQ ID NO: 455 - protein, 9 aa, Artificial Sequence
  Description of Artificial Sequence: Synthetic peptide
  N-term H or Acetyl
  MOD_RES (5)..(5): Tyr or Phospho-Tyr
  MOD_RES (7)..(7): Modified Cys
  See specification as filed for detailed description of substitutions and preferred embodiments
EEPIYACVP

SEQ ID NO: 456 - protein, 9 aa, Artificial Sequence
  Description of Artificial Sequence: Synthetic peptide
  N-term H or Acetyl
  MOD_RES (5)..(5): Tyr or Phospho-Tyr
  MOD_RES (7)..(7): Modified Cys
  See specification as filed for detailed description of substitutions and preferred embodiments
EEPIYACWK

SEQ ID NO: 457 - protein, 9 aa, Artificial Sequence
  Description of Artificial Sequence: Synthetic peptide
  N-term H or Acetyl
  MOD_RES (5)..(5): Tyr or Phospho-Tyr
  MOD_RES (7)..(7): Modified Cys
  See specification as filed for detailed description of substitutions and preferred embodiments
EEPIYACWM

SEQ ID NO: 458 - protein, 9 aa, Artificial Sequence
  Description of Artificial Sequence: Synthetic peptide
  N-term H or Acetyl
  MOD_RES (5)..(5): Tyr or Phospho-Tyr
  MOD_RES (7)..(7): Modified Cys
  See specification as filed for detailed description of substitutions and preferred embodiments
EEPIYACWP

SEQ ID NO: 459 - protein, 8 aa, Artificial Sequence
  Description of Artificial Sequence: Synthetic peptide
  N-term H or Acetyl
  MOD_RES (5)..(5): Tyr or Phospho-Tyr
  MOD_RES (7)..(7): Modified Cys
  See specification as filed for detailed description of substitutions and preferred embodiments
EEPIYACK

SEQ ID NO: 460 - protein, 8 aa, Artificial Sequence
  Description of Artificial Sequence: Synthetic peptide
  N-term H or Acetyl
  MOD_RES (5)..(5): Tyr or Phospho-Tyr
  MOD_RES (7)..(7): Modified Cys
  See specification as filed for detailed description of substitutions and preferred embodiments
EEPIYACM

SEQ ID NO: 461 - protein, 8 aa, Artificial Sequence
  Description of Artificial Sequence: Synthetic peptide
  N-term H or Acetyl
  MOD_RES (5)..(5): Tyr or Phospho-Tyr
  MOD_RES (7)..(7): Modified Cys
  See specification as filed for detailed description of substitutions and preferred embodiments
EEPIYACP

SEQ ID NO: 462 - protein, 9 aa, Artificial Sequence
  Description of Artificial Sequence: Synthetic peptide
  N-term H or Acetyl
  MOD_RES (5)..(5): Tyr or Phospho-Tyr
  MOD_RES (7)..(7): Modified Cys
  MOD_RES (8)..(8): Leu or Nle (i.e. isomer of Leucine)
  See specification as filed for detailed description of substitutions and preferred embodiments
EEPIYFCLK

SEQ ID NO: 463 - protein, 9 aa, Artificial Sequence
  Description of Artificial Sequence: Synthetic peptide
  N-term H or Acetyl
  MOD_RES (5)..(5): Tyr or Phospho-Tyr
  MOD_RES (7)..(7): Modified Cys
  MOD_RES (8)..(8): Leu or Nle (i.e. isomer of Leucine)
  See specification as filed for detailed description of substitutions and preferred embodiments
EEPIYFCLM

SEQ ID NO: 464 - protein, 9 aa, Artificial Sequence
  Description of Artificial Sequence: Synthetic peptide
  N-term H or Acetyl
  MOD_RES (5)..(5): Tyr or Phospho-Tyr
  MOD_RES (7)..(7): Modified Cys
  MOD_RES (8)..(8): Leu or Nle (i.e. isomer of Leucine)
  See specification as filed for detailed description of substitutions and preferred embodiments
EEPIYFCLP

SEQ ID NO: 465 - protein, 9 aa, Artificial Sequence
  Description of Artificial Sequence: Synthetic peptide
  N-term H or Acetyl
  MOD_RES (5)..(5): Tyr or Phospho-Tyr
  MOD_RES (7)..(7): Modified Cys
  See specification as filed for detailed description of substitutions and preferred embodiments
EEPIYFCFG

SEQ ID NO: 466 - protein, 9 aa, Artificial Sequence
  Description of Artificial Sequence: Synthetic peptide
  N-term H or Acetyl
  MOD_RES (5)..(5): Tyr or Phospho-Tyr
  MOD_RES (7)..(7): Modified Cys
  See specification as filed for detailed description of substitutions and preferred embodiments
EEPIYFCFK

SEQ ID NO: 467 - protein, 9 aa, Artificial Sequence
  Description of Artificial Sequence: Synthetic peptide
  N-term H or Acetyl
  MOD_RES (5)..(5): Tyr or Phospho-Tyr
  MOD_RES (7)..(7): Modified Cys
  See specification as filed for detailed description of substitutions and preferred embodiments
EEPIYFCFM

SEQ ID NO: 468 - protein, 9 aa, Artificial Sequence
  Description of Artificial Sequence: Synthetic peptide
  N-term H or Acetyl
  MOD_RES (5)..(5): Tyr or Phospho-Tyr
  MOD_RES (7)..(7): Modified Cys
  See specification as filed for detailed description of substitutions and preferred embodiments
EEPIYFCFP

SEQ ID NO: 469 - protein, 9 aa, Artificial Sequence
  Description of Artificial Sequence: Synthetic peptide
  N-term H or Acetyl
  MOD_RES (5)..(5): Tyr or Phospho-Tyr
  MOD_RES (7)..(7): Modified Cys
  See specification as filed for detailed description of substitutions and preferred embodiments
EEPIYFCIG

SEQ ID NO: 470 - protein, 9 aa, Artificial Sequence
  Description of Artificial Sequence: Synthetic peptide
  N-term H or Acetyl
  MOD_RES (5)..(5): Tyr or Phospho-Tyr
  MOD_RES (7)..(7): Modified Cys
  See specification as filed for detailed description of substitutions and preferred embodiments
EEPIYFCIK

SEQ ID NO: 471 - protein, 9 aa, Artificial Sequence
  Description of Artificial Sequence: Synthetic peptide
  N-term H or Acetyl
  MOD_RES (5)..(5): Tyr or Phospho-Tyr
  MOD_RES (7)..(7): Modified Cys
  See specification as filed for detailed description of substitutions and preferred embodiments
EEPIYFCIM

SEQ ID NO: 472 - protein, 9 aa, Artificial Sequence
  Description of Artificial Sequence: Synthetic peptide
  N-term H or Acetyl
  MOD_RES (5)..(5): Tyr or Phospho-Tyr
  MOD_RES (7)..(7): Modified Cys
  See specification as filed for detailed description of substitutions and preferred embodiments
EEPIYFCIP

SEQ ID NO: 473 - protein, 9 aa, Artificial Sequence
  Description of Artificial Sequence: Synthetic peptide
  N-term H or Acetyl
  MOD_RES (5)..(5): Tyr or Phospho-Tyr
  MOD_RES (7)..(7): Modified Cys
  See specification as filed for detailed description of substitutions and preferred embodiments
EEPIYFCLK

SEQ ID NO: 474 - protein, 9 aa, Artificial Sequence
  Description of Artificial Sequence: Synthetic peptide
  N-term H or Acetyl
  MOD_RES (5)..(5): Tyr or Phospho-Tyr
  MOD_RES (7)..(7): Modified Cys
  See specification as filed for detailed description of substitutions and preferred embodiments
EEPIYFCLM

SEQ ID NO: 475 - protein, 9 aa, Artificial Sequence
  Description of Artificial Sequence: Synthetic peptide
  N-term H or Acetyl
  MOD_RES (5)..(5): Tyr or Phospho-Tyr
  MOD_RES (7)..(7): Modified Cys
  See specification as filed for detailed description of substitutions and preferred embodiments
EEPIYFCLP

SEQ ID NO: 476 - protein, 9 aa, Artificial Sequence
  Description of Artificial Sequence: Synthetic peptide
  N-term H or Acetyl
  MOD_RES (5)..(5): Tyr or Phospho-Tyr
  MOD_RES (7)..(7): Modified Cys
  See specification as filed for detailed description of substitutions and preferred embodiments
EEPIYFCMG

SEQ ID NO: 477 - protein, 9 aa, Artificial Sequence
  Description of Artificial Sequence: Synthetic peptide
  N-term H or Acetyl
  MOD_RES (5)..(5): Tyr or Phospho-Tyr
  MOD_RES (7)..(7): Modified Cys
  See specification as filed for detailed description of substitutions and preferred embodiments
EEPIYFCMK

SEQ ID NO: 478 - protein, 9 aa, Artificial Sequence
  Description of Artificial Sequence: Synthetic peptide
  N-term H or Acetyl
  MOD_RES (5)..(5): Tyr or Phospho-Tyr
  MOD_RES (7)..(7): Modified Cys
  See specification as filed for detailed description of substitutions and preferred embodiments
EEPIYFCMM

SEQ ID NO: 479 - protein, 9 aa, Artificial Sequence
  Description of Artificial Sequence: Synthetic peptide
  N-term H or Acetyl
  MOD_RES (5)..(5): Tyr or Phospho-Tyr
  MOD_RES (7)..(7): Modified Cys
  See specification as filed for detailed description of substitutions and preferred embodiments
EEPIYFCMP

SEQ ID NO: 480 - protein, 9 aa, Artificial Sequence
  Description of Artificial Sequence: Synthetic peptide
  N-term H or Acetyl
  MOD_RES (5)..(5): Tyr or Phospho-Tyr
  MOD_RES (7)..(7): Modified Cys
  See specification as filed for detailed description of substitutions and preferred embodiments
EEPIYFCVG

SEQ ID NO: 481 - protein, 9 aa, Artificial Sequence
  Description of Artificial Sequence: Synthetic peptide
  N-term H or Acetyl
  MOD_RES (5)..(5): Tyr or Phospho-Tyr
  MOD_RES (7)..(7): Modified Cys
  See specification as filed for detailed description of substitutions and preferred embodiments
EEPIYFCVK

SEQ ID NO: 482 - protein, 9 aa, Artificial Sequence
  Description of Artificial Sequence: Synthetic peptide
  N-term H or Acetyl
  MOD_RES (5)..(5): Tyr or Phospho-Tyr
  MOD_RES (7)..(7): Modified Cys
  See specification as filed for detailed description of substitutions and preferred embodiments
EEPIYFCVM

SEQ ID NO: 483 - protein, 9 aa, Artificial Sequence
  Description of Artificial Sequence: Synthetic peptide
  N-term H or Acetyl
  MOD_RES (5)..(5): Tyr or Phospho-Tyr
  MOD_RES (7)..(7): Modified Cys
  See specification as filed for detailed description of substitutions and preferred embodiments
EEPIYFCVP

SEQ ID NO: 484 - protein, 9 aa, Artificial Sequence
  Description of Artificial Sequence: Synthetic peptide
  N-term H or Acetyl
  MOD_RES (5)..(5): Tyr or Phospho-Tyr
  MOD_RES (7)..(7): Modified Cys
  See specification as filed for detailed description of substitutions and preferred embodiments
EEPIYFCWK

SEQ ID NO: 485 - protein, 9 aa, Artificial Sequence
  Description of Artificial Sequence: Synthetic peptide
  N-term H or Acetyl
  MOD_RES (5)..(5): Tyr or Phospho-Tyr
  MOD_RES (7)..(7): Modified Cys
  See specification as filed for detailed description of substitutions and preferred embodiments
EEPIYFCWM

SEQ ID NO: 486 - protein, 9 aa, Artificial Sequence
  Description of Artificial Sequence: Synthetic peptide
  N-term H or Acetyl
  MOD_RES (5)..(5): Tyr or Phospho-Tyr
  MOD_RES (7)..(7): Modified Cys
  See specification as filed for detailed description of substitutions and preferred embodiments
EEPIYFCWP

SEQ ID NO: 487 - protein, 9 aa, Artificial Sequence
  Description of Artificial Sequence: Synthetic peptide
  N-term H or Acetyl
  MOD_RES (5)..(5): Tyr or Phospho-Tyr
  MOD_RES (7)..(7): Modified Cys
  MOD_RES (8)..(8): Leu or Nle (i.e. isomer of Leucine)
  See specification as filed for detailed description of substitutions and preferred embodiments
EEPIYICLK

SEQ ID NO: 488 - protein, 9 aa, Artificial Sequence
  Description of Artificial Sequence: Synthetic peptide
  N-term H or Acetyl
  MOD_RES (5)..(5): Tyr or Phospho-Tyr
  MOD_RES (7)..(7): Modified Cys
  MOD_RES (8)..(8): Leu or Nle (i.e. isomer of Leucine)
  See specification as filed for detailed description of substitutions and preferred embodiments
EEPIYICLM

SEQ ID NO: 489 - protein, 9 aa, Artificial Sequence
  Description of Artificial Sequence: Synthetic peptide
  N-term H or Acetyl
  MOD_RES (5)..(5): Tyr or Phospho-Tyr
  MOD_RES (7)..(7): Modified Cys
  MOD_RES (8)..(8): Leu or Nle (i.e. isomer of Leucine)
  See specification as filed for detailed description of substitutions and preferred embodiments
EEPIYICLP

SEQ ID NO: 490 - protein, 9 aa, Artificial Sequence
  Description of Artificial Sequence: Synthetic peptide
  N-term H or Acetyl
  MOD_RES (5)..(5): Tyr or Phospho-Tyr
  MOD_RES (7)..(7): Modified Cys
  See specification as filed for detailed description of substitutions and preferred embodiments
EEPIYICFG

SEQ ID NO: 491 - protein, 9 aa, Artificial Sequence
  Description of Artificial Sequence: Synthetic peptide
  N-term H or Acetyl
  MOD_RES (5)..(5): Tyr or Phospho-Tyr
  MOD_RES (7)..(7): Modified Cys
  See specification as filed for detailed description of substitutions and preferred embodiments
EEPIYICFK

SEQ ID NO: 492 - protein, 9 aa, Artificial Sequence
  Description of Artificial Sequence: Synthetic peptide
  N-term H or Acetyl
  MOD_RES (5)..(5): Tyr or Phospho-Tyr
  MOD_RES (7)..(7): Modified Cys
  See specification as filed for detailed description of substitutions and preferred embodiments
EEPIYICFM

SEQ ID NO: 493 - protein, 9 aa, Artificial Sequence
  Description of Artificial Sequence: Synthetic peptide
  N-term H or Acetyl
  MOD_RES (5)..(5): Tyr or Phospho-Tyr
  MOD_RES (7)..(7): Modified Cys
  See specification as filed for detailed description of substitutions and preferred embodiments
EEPIYICFP

SEQ ID NO: 494 - protein, 9 aa, Artificial Sequence
  Description of Artificial Sequence: Synthetic peptide
  N-term H or Acetyl
  MOD_RES (5)..(5): Tyr or Phospho-Tyr
  MOD_RES (7)..(7): Modified Cys
  See specification as filed for detailed description of substitutions and preferred embodiments
EEPIYICIG

SEQ ID NO: 495 - protein, 9 aa, Artificial Sequence
  Description of Artificial Sequence: Synthetic peptide
  N-term H or Acetyl
  MOD_RES (5)..(5): Tyr or Phospho-Tyr
  MOD_RES (7)..(7): Modified Cys
  See specification as filed for detailed description of substitutions and preferred embodiments
EEPIYICIK

SEQ ID NO: 496 - protein, 9 aa, Artificial Sequence
  Description of Artificial Sequence: Synthetic peptide
  N-term H or Acetyl
  MOD_RES (5)..(5): Tyr or Phospho-Tyr
  MOD_RES (7)..(7): Modified Cys
  See specification as filed for detailed description of substitutions and preferred embodiments
EEPIYICIM

SEQ ID NO: 497 - protein, 9 aa, Artificial Sequence
  Description of Artificial Sequence: Synthetic peptide
  N-term H or Acetyl
  MOD_RES (5)..(5): Tyr or Phospho-Tyr
  MOD_RES (7)..(7): Modified Cys
  See specification as filed for detailed description of substitutions and preferred embodiments
EEPIYICIP

SEQ ID NO: 498 - protein, 9 aa, Artificial Sequence
  Description of Artificial Sequence: Synthetic peptide
  N-term H or Acetyl
  MOD_RES (5)..(5): Tyr or Phospho-Tyr
  MOD_RES (7)..(7): Modified Cys
  See specification as filed for detailed description of substitutions and preferred embodiments
EEPIYICLK

SEQ ID NO: 499 - protein, 9 aa, Artificial Sequence
  Description of Artificial Sequence: Synthetic peptide
  N-term H or Acetyl
  MOD_RES (5)..(5): Tyr or Phospho-Tyr
  MOD_RES (7)..(7): Modified Cys
  See specification as filed for detailed description of substitutions and preferred embodiments
EEPIYICLM

SEQ ID NO: 500 - protein, 9 aa, Artificial Sequence
  Description of Artificial Sequence: Synthetic peptide
  N-term H or Acetyl
  MOD_RES (5)..(5): Tyr or Phospho-Tyr
  MOD_RES (7)..(7): Modified Cys
  See specification as filed for detailed description of substitutions and preferred embodiments
EEPIYICLP

SEQ ID NO: 501 - protein, 9 aa, Artificial Sequence
  Description of Artificial Sequence: Synthetic peptide
  N-term H or Acetyl
  MOD_RES (5)..(5): Tyr or Phospho-Tyr
  MOD_RES (7)..(7): Modified Cys
  See specification as filed for detailed description of substitutions and preferred embodiments
EEPIYICMG

SEQ ID NO: 502 - protein, 9 aa, Artificial Sequence
  Description of Artificial Sequence: Synthetic peptide
  N-term H or Acetyl
  MOD_RES (5)..(5): Tyr or Phospho-Tyr
  MOD_RES (7)..(7): Modified Cys
  See specification as filed for detailed description of substitutions and preferred embodiments
EEPIYICMK

SEQ ID NO: 503 - protein, 9 aa, Artificial Sequence
  Description of Artificial Sequence: Synthetic peptide
  N-term H or Acetyl
  MOD_RES (5)..(5): Tyr or Phospho-Tyr
  MOD_RES (7)..(7): Modified Cys
  See specification as filed for detailed description of substitutions and preferred embodiments
EEPIYICMK

SEQ ID NO: 504 - protein, 9 aa, Artificial Sequence
  Description of Artificial Sequence: Synthetic peptide
  N-term H or Acetyl
  MOD_RES (5)..(5): Tyr or Phospho-Tyr
  MOD_RES (7)..(7): Modified Cys
  See specification as filed for detailed description of substitutions and preferred embodiments
EEPIYICMM

SEQ ID NO: 505 - protein, 9 aa, Artificial Sequence
  Description of Artificial Sequence: Synthetic peptide
  N-term H or Acetyl
  MOD_RES (5)..(5): Tyr or Phospho-Tyr
  MOD_RES (7)..(7): Modified Cys
  See specification as filed for detailed description of substitutions and preferred embodiments
EEPIYICMP

SEQ ID NO: 506 - protein, 9 aa, Artificial Sequence
  Description of Artificial Sequence: Synthetic peptide
  N-term H or Acetyl
  MOD_RES (5)..(5): Tyr or Phospho-Tyr
  MOD_RES (7)..(7): Modified Cys
  See specification as filed for detailed description of substitutions and preferred embodiments
EEPIYICVG

SEQ ID NO: 507 - protein, 9 aa, Artificial Sequence
  Description of Artificial Sequence: Synthetic peptide
  N-term H or Acetyl
  MOD_RES (5)..(5): Tyr or Phospho-Tyr
  MOD_RES (7)..(7): Modified Cys
  See specification as filed for detailed description of substitutions and preferred embodiments
EEPIYICVK

SEQ ID NO: 508 - protein, 9 aa, Artificial Sequence
  Description of Artificial Sequence: Synthetic peptide
  N-term H or Acetyl
  MOD_RES (5)..(5): Tyr or Phospho-Tyr
  MOD_RES (7)..(7): Modified Cys
  See specification as filed for detailed description of substitutions and preferred embodiments
EEPIYICVM

SEQ ID NO: 509 - protein, 9 aa, Artificial Sequence
  Description of Artificial Sequence: Synthetic peptide
  N-term H or Acetyl
  MOD_RES (5)..(5): Tyr or Phospho-Tyr
  MOD_RES (7)..(7): Modified Cys
  See specification as filed for detailed description of substitutions and preferred embodiments
EEPIYICWK

SEQ ID NO: 510 - protein, 9 aa, Artificial Sequence
  Description of Artificial Sequence: Synthetic peptide
  N-term H or Acetyl
  MOD_RES (5)..(5): Tyr or Phospho-Tyr
  MOD_RES (7)..(7): Modified Cys
  See specification as filed for detailed description of substitutions and preferred embodiments
EEPIYICWM

SEQ ID NO: 511 - protein, 9 aa, Artificial Sequence
  Description of Artificial Sequence: Synthetic peptide
  N-term H or Acetyl
  MOD_RES (5)..(5): Tyr or Phospho-Tyr
  MOD_RES (7)..(7): Modified Cys
  See specification as filed for detailed description of substitutions and preferred embodiments
EEPIYICWP

SEQ ID NO: 512 - protein, 8 aa, Artificial Sequence
  Description of Artificial Sequence: Synthetic peptide
  N-term H or Acetyl
  MOD_RES (5)..(5): Tyr or Phospho-Tyr
  MOD_RES (7)..(7): Modified Cys
  See specification as filed for detailed description of substitutions and preferred embodiments
EEPIYICK

SEQ ID NO: 513 - protein, 8 aa, Artificial Sequence
  Description of Artificial Sequence: Synthetic peptide
  N-term H or Acetyl
  MOD_RES (5)..(5): Tyr or Phospho-Tyr
  MOD_RES (7)..(7): Modified Cys
  See specification as filed for detailed description of substitutions and preferred embodiments
EEPIYICM

SEQ ID NO: 514 - protein, 8 aa, Artificial Sequence
  Description of Artificial Sequence: Synthetic peptide
  N-term H or Acetyl
  MOD_RES (5)..(5): Tyr or Phospho-Tyr
  MOD_RES (7)..(7): Modified Cys
  See specification as filed for detailed description of substitutions and preferred embodiments
EEPIYICP

SEQ ID NO: 515 - protein, 9 aa, Artificial Sequence
  Description of Artificial Sequence: Synthetic peptide
  N-term H or Acetyl
  MOD_RES (5)..(5): Tyr or Phospho-Tyr
  MOD_RES (7)..(7): Modified Cys
  MOD_RES (8)..(8): Leu or Nle (i.e. isomer of Leucine)
  See specification as filed for detailed description of substitutions and preferred embodiments
EEPIYMCLK

SEQ ID NO: 516 - protein, 9 aa, Artificial Sequence
  Description of Artificial Sequence: Synthetic peptide
  N-term H or Acetyl
  MOD_RES (5)..(5): Tyr or Phospho-Tyr
  MOD_RES (7)..(7): Modified Cys
  MOD_RES (8)..(8): Leu or Nle (i.e. isomer of Leucine)
  See specification as filed for detailed description of substitutions and preferred embodiments
EEPIYMCLM

SEQ ID NO: 517 - protein, 9 aa, Artificial Sequence
  Description of Artificial Sequence: Synthetic peptide
  N-term H or Acetyl
  MOD_RES (5)..(5): Tyr or Phospho-Tyr
  MOD_RES (7)..(7): Modified Cys
  MOD_RES (8)..(8): Leu or Nle (i.e. isomer of Leucine)
  See specification as filed for detailed description of substitutions and preferred embodiments
EEPIYMCLP

SEQ ID NO: 518 - protein, 9 aa, Artificial Sequence
  Description of Artificial Sequence: Synthetic peptide
  N-term H or Acetyl
  MOD_RES (5)..(5): Tyr or Phospho-Tyr
  MOD_RES (7)..(7): Modified Cys
  See specification as filed for detailed description of substitutions and preferred embodiments
EEPIYMCFK

SEQ ID NO: 519 - protein, 9 aa, Artificial Sequence
  Description of Artificial Sequence: Synthetic peptide
  N-term H or Acetyl
  MOD_RES (5)..(5): Tyr or Phospho-Tyr
  MOD_RES (7)..(7): Modified Cys
  See specification as filed for detailed description of substitutions and preferred embodiments
EEPIYMCFM

SEQ ID NO: 520 - protein, 9 aa, Artificial Sequence
  Description of Artificial Sequence: Synthetic peptide
  N-term H or Acetyl
  MOD_RES (5)..(5): Tyr or Phospho-Tyr
  MOD_RES (7)..(7): Modified Cys
  See specification as filed for detailed description of substitutions and preferred embodiments
EEPIYMCFP

SEQ ID NO: 521 - protein, 9 aa, Artificial Sequence
  Description of Artificial Sequence: Synthetic peptide
  N-term H or Acetyl
  MOD_RES (5)..(5): Tyr or Phospho-Tyr
  MOD_RES (7)..(7): Modified Cys
  See specification as filed for detailed description of substitutions and preferred embodiments
EEPIYMCIK

SEQ ID NO: 522 - protein, 9 aa, Artificial Sequence
  Description of Artificial Sequence: Synthetic peptide
  N-term H or Acetyl
  MOD_RES (5)..(5): Tyr or Phospho-Tyr
  MOD_RES (7)..(7): Modified Cys
  See specification as filed for detailed description of substitutions and preferred embodiments
EEPIYMCIM

SEQ ID NO: 523 - protein, 9 aa, Artificial Sequence
  Description of Artificial Sequence: Synthetic peptide
  N-term H or Acetyl
  MOD_RES (5)..(5): Tyr or Phospho-Tyr
  MOD_RES (7)..(7): Modified Cys
  See specification as filed for detailed description of substitutions and preferred embodiments
EEPIYMCIP

SEQ ID NO: 524 - protein, 9 aa, Artificial Sequence
  Description of Artificial Sequence: Synthetic peptide
  N-term H or Acetyl
  MOD_RES (5)..(5): Tyr or Phospho-Tyr
  MOD_RES (7)..(7): Modified Cys
  See specification as filed for detailed description of substitutions and preferred embodiments
EEPIYMCLK

SEQ ID NO: 525 - protein, 9 aa, Artificial Sequence
  Description of Artificial Sequence: Synthetic peptide
  N-term H or Acetyl
  MOD_RES (5)..(5): Tyr or Phospho-Tyr
  MOD_RES (7)..(7): Modified Cys
  See specification as filed for detailed description of substitutions and preferred embodiments
EEPIYMCLM

SEQ ID NO: 526 - protein, 9 aa, Artificial Sequence
  Description of Artificial Sequence: Synthetic peptide
  N-term H or Acetyl
  MOD_RES (5)..(5): Tyr or Phospho-Tyr
  MOD_RES (7)..(7): Modified Cys
  See specification as filed for detailed description of substitutions and preferred embodiments
EEPIYMCLP

SEQ ID NO: 527 - protein, 9 aa, Artificial Sequence
  Description of Artificial Sequence: Synthetic peptide
  N-term H or Acetyl
  MOD_RES (5)..(5): Tyr or Phospho-Tyr
  MOD_RES (7)..(7): Modified Cys
  See specification as filed for detailed description of substitutions and preferred embodiments
EEPIYMCMK

SEQ ID NO: 528 - protein, 9 aa, Artificial Sequence
  Description of Artificial Sequence: Synthetic peptide
  N-term H or Acetyl
  MOD_RES (5)..(5): Tyr or Phospho-Tyr
  MOD_RES (7)..(7): Modified Cys
  See specification as filed for detailed description of substitutions and preferred embodiments
EEPIYMCMM

SEQ ID NO: 529 - protein, 9 aa, Artificial Sequence
  Description of Artificial Sequence: Synthetic peptide
  N-term H or Acetyl
  MOD_RES (5)..(5): Tyr or Phospho-Tyr
  MOD_RES (7)..(7): Modified Cys
  See specification as filed for detailed description of substitutions and preferred embodiments
EEPIYMCMP

SEQ ID NO: 530 - protein, 9 aa, Artificial Sequence
  Description of Artificial Sequence: Synthetic peptide
  N-term H or Acetyl
  MOD_RES (5)..(5): Tyr or Phospho-Tyr
  MOD_RES (7)..(7): Modified Cys
  See specification as filed for detailed description of substitutions and preferred embodiments
EEPIYMCVK

SEQ ID NO: 531 - protein, 9 aa, Artificial Sequence
  Description of Artificial Sequence: Synthetic peptide
  N-term H or Acetyl
  MOD_RES (5)..(5): Tyr or Phospho-Tyr
  MOD_RES (7)..(7): Modified Cys
  See specification as filed for detailed description of substitutions and preferred embodiments
EEPIYMCVM

SEQ ID NO: 532 - protein, 9 aa, Artificial Sequence
  Description of Artificial Sequence: Synthetic peptide
  N-term H or Acetyl
  MOD_RES (5)..(5): Tyr or Phospho-Tyr
  MOD_RES (7)..(7): Modified Cys
  See specification as filed for detailed description of substitutions and preferred embodiments
EEPIYMCVP

SEQ ID NO: 533 - protein, 9 aa, Artificial Sequence
  Description of Artificial Sequence: Synthetic peptide
  N-term H or Acetyl
  MOD_RES (5)..(5): Tyr or Phospho-Tyr
  MOD_RES (7)..(7): Modified Cys
  See specification as filed for detailed description of substitutions and preferred embodiments
EEPIYMCWK

SEQ ID NO: 534 - protein, 9 aa, Artificial Sequence
  Description of Artificial Sequence: Synthetic peptide
  N-term H or Acetyl
  MOD_RES (5)..(5): Tyr or Phospho-Tyr
  MOD_RES (7)..(7): Modified Cys
  See specification as filed for detailed description of substitutions and preferred embodiments
EEPIYMCWM

SEQ ID NO: 535 - protein, 9 aa, Artificial Sequence
  Description of Artificial Sequence: Synthetic peptide
  N-term H or Acetyl
  MOD_RES (5)..(5): Tyr or Phospho-Tyr
  MOD_RES (7)..(7): Modified Cys
  See specification as filed for detailed description of substitutions and preferred embodiments
EEPIYMCWP

SEQ ID NO: 536 - protein, 9 aa, Artificial Sequence
  Description of Artificial Sequence: Synthetic peptide
  N-term H or Acetyl
  MOD_RES (5)..(5): Tyr or Phospho-Tyr
  MOD_RES (7)..(7): Modified Cys
  MOD_RES (8)..(8): Leu or Nle (i.e. isomer of Leucine)
  See specification as filed for detailed description of substitutions and preferred embodiments
EEPIYVCLK

SEQ ID NO: 537 - protein, 9 aa, Artificial Sequence
  Description of Artificial Sequence: Synthetic peptide
  N-term H or Acetyl
  MOD_RES (5)..(5): Tyr or Phospho-Tyr
  MOD_RES (7)..(7): Modified Cys
  MOD_RES (8)..(8): Leu or Nle (i.e. isomer of Leucine)
  See specification as filed for detailed description of substitutions and preferred embodiments
EEPIYVCLM

SEQ ID NO: 538 - protein, 9 aa, Artificial Sequence
  Description of Artificial Sequence: Synthetic peptide
  N-term H or Acetyl
  MOD_RES (5)..(5): Tyr or Phospho-Tyr
  MOD_RES (7)..(7): Modified Cys
  MOD_RES (8)..(8): Leu or Nle (i.e. isomer of Leucine)
  See specification as filed for detailed description of substitutions and preferred embodiments
EEPIYVCLP

SEQ ID NO: 539 - protein, 9 aa, Artificial Sequence
  Description of Artificial Sequence: Synthetic peptide
  N-term H or Acetyl
  MOD_RES (5)..(5): Tyr or Phospho-Tyr
  MOD_RES (7)..(7): Modified Cys
  See specification as filed for detailed description of substitutions and preferred embodiments
EEPIYVCFG

SEQ ID NO: 540 - protein, 9 aa, Artificial Sequence
  Description of Artificial Sequence: Synthetic peptide
  N-term H or Acetyl
  MOD_RES (5)..(5): Tyr or Phospho-Tyr
  MOD_RES (7)..(7): Modified Cys
  See specification as filed for detailed description of substitutions and preferred embodiments
EEPIYVCFK

SEQ ID NO: 541 - protein, 9 aa, Artificial Sequence
  Description of Artificial Sequence: Synthetic peptide
  N-term H or Acetyl
  MOD_RES (5)..(5): Tyr or Phospho-Tyr
  MOD_RES (7)..(7): Modified Cys
  See specification as filed for detailed description of substitutions and preferred embodiments
EEPIYVCFM

SEQ ID NO: 542 - protein, 9 aa, Artificial Sequence
  Description of Artificial Sequence: Synthetic peptide
  N-term H or Acetyl
  MOD_RES (5)..(5): Tyr or Phospho-Tyr
  MOD_RES (7)..(7): Modified Cys
  See specification as filed for detailed description of substitutions and preferred embodiments
EEPIYVCFP

SEQ ID NO: 543 - protein, 9 aa, Artificial Sequence
  Description of Artificial Sequence: Synthetic peptide
  N-term H or Acetyl
  MOD_RES (5)..(5): Tyr or Phospho-Tyr
  MOD_RES (7)..(7): Modified Cys
  See specification as filed for detailed description of substitutions and preferred embodiments
EEPIYVCIG

SEQ ID NO: 544 - protein, 9 aa, Artificial Sequence
  Description of Artificial Sequence: Synthetic peptide
  N-term H or Acetyl
  MOD_RES (5)..(5): Tyr or Phospho-Tyr
  MOD_RES (7)..(7): Modified Cys
  See specification as filed for detailed description of substitutions and preferred embodiments
EEPIYVCIK

SEQ ID NO: 545 - protein, 9 aa, Artificial Sequence
  Description of Artificial Sequence: Synthetic peptide
  N-term H or Acetyl
  MOD_RES (5)..(5): Tyr or Phospho-Tyr
  MOD_RES (7)..(7): Modified Cys
  See specification as filed for detailed description of substitutions and preferred embodiments
EEPIYVCIM

SEQ ID NO: 546 - protein, 9 aa, Artificial Sequence
  Description of Artificial Sequence: Synthetic peptide
  N-term H or Acetyl
  MOD_RES (5)..(5): Tyr or Phospho-Tyr
  MOD_RES (7)..(7): Modified Cys
  See specification as filed for detailed description of substitutions and preferred embodiments
EEPIYVCIP

SEQ ID NO: 547 - protein, 9 aa, Artificial Sequence
  Description of Artificial Sequence: Synthetic peptide
  N-term H or Acetyl
  MOD_RES (5)..(5): Tyr or Phospho-Tyr
  MOD_RES (7)..(7): Modified Cys
  See specification as filed for detailed description of substitutions and preferred embodiments
EEPIYVCLK

SEQ ID NO: 548 - protein, 9 aa, Artificial Sequence
  Description of Artificial Sequence: Synthetic peptide
  N-term H or Acetyl
  MOD_RES (5)..(5): Tyr or Phospho-Tyr
  MOD_RES (7)..(7): Modified Cys
  See specification as filed for detailed description of substitutions and preferred embodiments
EEPIYVCLM

SEQ ID NO: 549 - protein, 9 aa, Artificial Sequence
  Description of Artificial Sequence: Synthetic peptide
  N-term H or Acetyl
  MOD_RES (5)..(5): Tyr or Phospho-Tyr
  MOD_RES (7)..(7): Modified Cys
  See specification as filed for detailed description of substitutions and preferred embodiments
EEPIYVCLP

SEQ ID NO: 550 - protein, 9 aa, Artificial Sequence
  Description of Artificial Sequence: Synthetic peptide
  N-term H or Acetyl
  MOD_RES (5)..(5): Tyr or Phospho-Tyr
  MOD_RES (7)..(7): Modified Cys
  See specification as filed for detailed description of substitutions and preferred embodiments
EEPIYVCMG

SEQ ID NO: 551 - protein, 9 aa, Artificial Sequence
  Description of Artificial Sequence: Synthetic peptide
  N-term H or Acetyl
  MOD_RES (5)..(5): Tyr or Phospho-Tyr
  MOD_RES (7)..(7): Modified Cys
  See specification as filed for detailed description of substitutions and preferred embodiments
EEPIYVCMK

SEQ ID NO: 552 - protein, 9 aa, Artificial Sequence
  Description of Artificial Sequence: Synthetic peptide
  N-term H or Acetyl
  MOD_RES (5)..(5): Tyr or Phospho-Tyr
  MOD_RES (7)..(7): Modified Cys
  See specification as filed for detailed description of substitutions and preferred embodiments
EEPIYVCMM

SEQ ID NO: 553 - protein, 9 aa, Artificial Sequence
  Description of Artificial Sequence: Synthetic peptide
  N-term H or Acetyl
  MOD_RES (5)..(5): Tyr or Phospho-Tyr
  MOD_RES (7)..(7): Modified Cys
  See specification as filed for detailed description of substitutions and preferred embodiments
EEPIYVCMP

SEQ ID NO: 554 - protein, 9 aa, Artificial Sequence
  Description of Artificial Sequence: Synthetic peptide
  N-term H or Acetyl
  MOD_RES (5)..(5): Tyr or Phospho-Tyr
  MOD_RES (7)..(7): Modified Cys
  See specification as filed for detailed description of substitutions and preferred embodiments
EEPIYVCVG

SEQ ID NO: 555 - protein, 9 aa, Artificial Sequence
  Description of Artificial Sequence: Synthetic peptide
  N-term H or Acetyl
  MOD_RES (5)..(5): Tyr or Phospho-Tyr
  MOD_RES (7)..(7): Modified Cys
  See specification as filed for detailed description of substitutions and preferred embodiments
EEPIYVCVK

SEQ ID NO: 556 - protein, 9 aa, Artificial Sequence
  Description of Artificial Sequence: Synthetic peptide
  N-term H or Acetyl
  MOD_RES (5)..(5): Tyr or Phospho-Tyr
  MOD_RES (7)..(7): Modified Cys
  See specification as filed for detailed description of substitutions and preferred embodiments
EEPIYVCVM

SEQ ID NO: 557 - protein, 9 aa, Artificial Sequence
  Description of Artificial Sequence: Synthetic peptide
  N-term H or Acetyl
  MOD_RES (5)..(5): Tyr or Phospho-Tyr
  MOD_RES (7)..(7): Modified Cys
  See specification as filed for detailed description of substitutions and preferred embodiments
EEPIYVCVP

SEQ ID NO: 558 - protein, 9 aa, Artificial Sequence
  Description of Artificial Sequence: Synthetic peptide
  N-term H or Acetyl
  MOD_RES (5)..(5): Tyr or Phospho-Tyr
  MOD_RES (7)..(7): Modified Cys
  See specification as filed for detailed description of substitutions and preferred embodiments
EEPIYVCWK

SEQ ID NO: 559 - protein, 9 aa, Artificial Sequence
  Description of Artificial Sequence: Synthetic peptide
  N-term H or Acetyl
  MOD_RES (5)..(5): Tyr or Phospho-Tyr
  MOD_RES (7)..(7): Modified Cys
  See specification as filed for detailed description of substitutions and preferred embodiments
EEPIYVCWM

SEQ ID NO: 560 - protein, 9 aa, Artificial Sequence
  Description of Artificial Sequence: Synthetic peptide
  N-term H or Acetyl
  MOD_RES (5)..(5): Tyr or Phospho-Tyr
  MOD_RES (7)..(7): Modified Cys
  See specification as filed for detailed description of substitutions and preferred embodiments
EEPIYVCWP

SEQ ID NO: 561 - protein, 8 aa, Artificial Sequence
  Description of Artificial Sequence: Synthetic peptide
  N-term H or Acetyl
  MOD_RES (5)..(5): Tyr or Phospho-Tyr
  MOD_RES (7)..(7): Modified Cys
  See specification as filed for detailed description of substitutions and preferred embodiments
EEPIYVCK

SEQ ID NO: 562 - protein, 8 aa, Artificial Sequence
  Description of Artificial Sequence: Synthetic peptide
  N-term H or Acetyl
  MOD_RES (5)..(5): Tyr or Phospho-Tyr
  MOD_RES (7)..(7): Modified Cys
  See specification as filed for detailed description of substitutions and preferred embodiments
EEPIYVCM

SEQ ID NO: 563 - protein, 8 aa, Artificial Sequence
  Description of Artificial Sequence: Synthetic peptide
  N-term H or Acetyl
  MOD_RES (5)..(5): Tyr or Phospho-Tyr
  MOD_RES (7)..(7): Modified Cys
  See specification as filed for detailed description of substitutions and preferred embodiments
EEPIYVCP

SEQ ID NO: 564 - protein, 9 aa, Artificial Sequence
  Description of Artificial Sequence: Synthetic peptide
  N-term H or Acetyl
  MOD_RES (5)..(5): Tyr or Phospho-Tyr
  MOD_RES (7)..(7): Modified Cys
  MOD_RES (8)..(8): Leu or Nle (i.e. isomer of Leucine)
  See specification as filed for detailed description of substitutions and preferred embodiments
EEPIYWCLK

SEQ ID NO: 565 - protein, 9 aa, Artificial Sequence
  Description of Artificial Sequence: Synthetic peptide
  N-term H or Acetyl
  MOD_RES (5)..(5): Tyr or Phospho-Tyr
  MOD_RES (7)..(7): Modified Cys
  MOD_RES (8)..(8): Leu or Nle (i.e. isomer of Leucine)
  See specification as filed for detailed description of substitutions and preferred embodiments
EEPIYWCLM

SEQ ID NO: 566 - protein, 9 aa, Artificial Sequence
  Description of Artificial Sequence: Synthetic peptide
  N-term H or Acetyl
  MOD_RES (5)..(5): Tyr or Phospho-Tyr
  MOD_RES (7)..(7): Modified Cys
  MOD_RES (8)..(8): Leu or Nle (i.e. isomer of Leucine)
  See specification as filed for detailed description of substitutions and preferred embodiments
EEPIYWCLP

SEQ ID NO: 567 - protein, 9 aa, Artificial Sequence
  Description of Artificial Sequence: Synthetic peptide
  N-term H or Acetyl
  MOD_RES (5)..(5): Tyr or Phospho-Tyr
  MOD_RES (7)..(7): Modified Cys
  See specification as filed for detailed description of substitutions and preferred embodiments
EEPIYWCFK

SEQ ID NO: 568 - protein, 9 aa, Artificial Sequence
  Description of Artificial Sequence: Synthetic peptide
  N-term H or Acetyl
  MOD_RES (5)..(5): Tyr or Phospho-Tyr
  MOD_RES (7)..(7): Modified Cys
  See specification as filed for detailed description of substitutions and preferred embodiments
EEPIYWCFM

SEQ ID NO: 569 - protein, 9 aa, Artificial Sequence
  Description of Artificial Sequence: Synthetic peptide
  N-term H or Acetyl
  MOD_RES (5)..(5): Tyr or Phospho-Tyr
  MOD_RES (7)..(7): Modified Cys
  See specification as filed for detailed description of substitutions and preferred embodiments
EEPIYWCFP

SEQ ID NO: 570 - protein, 9 aa, Artificial Sequence
  Description of Artificial Sequence: Synthetic peptide
  N-term H or Acetyl
  MOD_RES (5)..(5): Tyr or Phospho-Tyr
  MOD_RES (7)..(7): Modified Cys
  See specification as filed for detailed description of substitutions and preferred embodiments
EEPIYWCIK

SEQ ID NO: 571 - protein, 9 aa, Artificial Sequence
  Description of Artificial Sequence: Synthetic peptide
  N-term H or Acetyl
  MOD_RES (5)..(5): Tyr or Phospho-Tyr
  MOD_RES (7)..(7): Modified Cys
  See specification as filed for detailed description of substitutions and preferred embodiments
EEPIYWCIM

SEQ ID NO: 572 - protein, 9 aa, Artificial Sequence
  Description of Artificial Sequence: Synthetic peptide
  N-term H or Acetyl
  MOD_RES (5)..(5): Tyr or Phospho-Tyr
  MOD_RES (7)..(7): Modified Cys
  See specification as filed for detailed description of substitutions and preferred embodiments
EEPIYWCIP

SEQ ID NO: 573 - protein, 9 aa, Artificial Sequence
  Description of Artificial Sequence: Synthetic peptide
  N-term H or Acetyl
  MOD_RES (5)..(5): Tyr or Phospho-Tyr
  MOD_RES (7)..(7): Modified Cys
  See specification as filed for detailed description of substitutions and preferred embodiments
EEPIYWCLK

SEQ ID NO: 574 - protein, 9 aa, Artificial Sequence
  Description of Artificial Sequence: Synthetic peptide
  N-term H or Acetyl
  MOD_RES (5)..(5): Tyr or Phospho-Tyr
  MOD_RES (7)..(7): Modified Cys
  See specification as filed for detailed description of substitutions and preferred embodiments
EEPIYWCLM

SEQ ID NO: 575 - protein, 9 aa, Artificial Sequence
  Description of Artificial Sequence: Synthetic peptide
  N-term H or Acetyl
  MOD_RES (5)..(5): Tyr or Phospho-Tyr
  MOD_RES (7)..(7): Modified Cys
  See specification as filed for detailed description of substitutions and preferred embodiments
EEPIYWCLP

SEQ ID NO: 576 - protein, 9 aa, Artificial Sequence
  Description of Artificial Sequence: Synthetic peptide
  N-term H or Acetyl
  MOD_RES (5)..(5): Tyr or Phospho-Tyr
  MOD_RES (7)..(7): Modified Cys
  See specification as filed for detailed description of substitutions and preferred embodiments
EEPIYWCMK

SEQ ID NO: 577 - protein, 9 aa, Artificial Sequence
  Description of Artificial Sequence: Synthetic peptide
  N-term H or Acetyl
  MOD_RES (5)..(5): Tyr or Phospho-Tyr
  MOD_RES (7)..(7): Modified Cys
  See specification as filed for detailed description of substitutions and preferred embodiments
EEPIYWCMM

SEQ ID NO: 578 - protein, 9 aa, Artificial Sequence
  Description of Artificial Sequence: Synthetic peptide
  N-term H or Acetyl
  MOD_RES (5)..(5): Tyr or Phospho-Tyr
  MOD_RES (7)..(7): Modified Cys
  See specification as filed for detailed description of substitutions and preferred embodiments
EEPIYWCMP

SEQ ID NO: 579 - protein, 9 aa, Artificial Sequence
  Description of Artificial Sequence: Synthetic peptide
  N-term H or Acetyl
  MOD_RES (5)..(5): Tyr or Phospho-Tyr
  MOD_RES (7)..(7): Modified Cys
  See specification as filed for detailed description of substitutions and preferred embodiments
EEPIYWCVK

SEQ ID NO: 580 - protein, 9 aa, Artificial Sequence
  Description of Artificial Sequence: Synthetic peptide
  N-term H or Acetyl
  MOD_RES (5)..(5): Tyr or Phospho-Tyr
  MOD_RES (7)..(7): Modified Cys
  See specification as filed for detailed description of substitutions and preferred embodiments
EEPIYWCVM

SEQ ID NO: 581 - protein, 9 aa, Artificial Sequence
  Description of Artificial Sequence: Synthetic peptide
  N-term H or Acetyl
  MOD_RES (5)..(5): Tyr or Phospho-Tyr
  MOD_RES (7)..(7): Modified Cys
  See specification as filed for detailed description of substitutions and preferred embodiments
EEPIYWCVP

SEQ ID NO: 582 - protein, 9 aa, Artificial Sequence
  Description of Artificial Sequence: Synthetic peptide
  N-term H or Acetyl
  MOD_RES (5)..(5): Tyr or Phospho-Tyr
  MOD_RES (7)..(7): Modified Cys
  See specification as filed for detailed description of substitutions and preferred embodiments
EEPIYWCWK

SEQ ID NO: 583 - protein, 9 aa, Artificial Sequence
  Description of Artificial Sequence: Synthetic peptide
  N-term H or Acetyl
  MOD_RES (5)..(5): Tyr or Phospho-Tyr
  MOD_RES (7)..(7): Modified Cys
  See specification as filed for detailed description of substitutions and preferred embodiments
EEPIYWCWM

SEQ ID NO: 584 - protein, 9 aa, Artificial Sequence
  Description of Artificial Sequence: Synthetic peptide
  N-term H or Acetyl
  MOD_RES (5)..(5): Tyr or Phospho-Tyr
  MOD_RES (7)..(7): Modified Cys
  See specification as filed for detailed description of substitutions and preferred embodiments
EEPIYWCWP

SEQ ID NO: 585 - protein, 14 aa, Artificial Sequence
  Description of Artificial Sequence: Synthetic peptide
  N-term H or Acetyl
  MOD_RES (7)..(7): Ser or Phospho-Ser
  MOD_RES (9)..(9): Modified Cys
  See specification as filed for detailed description of substitutions and preferred embodiments
RARRRLSFCGFGSR

SEQ ID NO: 586 - protein, 13 aa, Artificial Sequence
  Description of Artificial Sequence: Synthetic peptide
  N-term H or Acetyl
  MOD_RES (9)..(9): Ser or Phospho-Ser
  MOD_RES (11)..(11): Modified Cys
  See specification as filed for detailed description of substitutions and preferred embodiments
LKKLRRRLSDCVA

SEQ ID NO: 587 - protein, 16 aa, Artificial Sequence
  Description of Artificial Sequence: Synthetic peptide
  N-term H or Acetyl
  MOD_RES (4)..(4): Modified Cys
  MOD_RES (6)..(6): Ser or Phospho-Ser
  See specification as filed for detailed description of substitutions and preferred embodiments
SPSCQSSMVARTQTVR

SEQ ID NO: 588 - protein, 11 aa, Artificial Sequence
  Description of Artificial Sequence: Synthetic peptide
  N-term H or Acetyl
  MOD_RES (8)..(8): Thr or Phospho-Thr
  MOD_RES (10)..(10): Modified Cys
  See specification as filed for detailed description of substitutions and preferred embodiments
RKRDRLGTLCI

SEQ ID NO: 589 - protein, 14 aa, Artificial Sequence
  Description of Artificial Sequence: Synthetic peptide
  N-term H or Acetyl
  MOD_RES (7)..(7): Ser or Phospho-Ser
  MOD_RES (9)..(9): Modified Cys
  See specification as filed for detailed description of substitutions and preferred embodiments
KRRRLASLCGHMAR

SEQ ID NO: 590 - protein, 13 aa, Artificial Sequence
  Description of Artificial Sequence: Synthetic peptide
  N-term H or Acetyl
  MOD_RES (9)..(9): Thr or Phospho-Thr
  MOD_RES (11)..(11): Modified Cys
  See specification as filed for detailed description of substitutions and preferred embodiments
ARARPRTYTFCHH

SEQ ID NO: 591 - protein, 12 aa, Artificial Sequence
  Description of Artificial Sequence: Synthetic peptide
  N-term H or Acetyl
  MOD_RES (8)..(8): Ser or Phospho-Ser
  MOD_RES (10)..(10): Modified Cys
  See specification as filed for detailed description of substitutions and preferred embodiments
KKRNRTLSVCVG

SEQ ID NO: 592 - protein, 13 aa, Artificial Sequence
  Description of Artificial Sequence: Synthetic peptide
  N-term H or Acetyl
  MOD_RES (9)..(9): Ser or Phospho-Ser
  MOD_RES (11)..(11): Modified Cys
  See specification as filed for detailed description of substitutions and preferred embodiments
KKRPQRRYSNCFS

SEQ ID NO: 593 - protein, 13 aa, Artificial Sequence
  Description of Artificial Sequence: Synthetic peptide
  N-term H or Acetyl
  MOD_RES (9)..(9): Thr or Phospho-Thr
  MOD_RES (11)..(11): Modified Cys
  See specification as filed for detailed description of substitutions and preferred embodiments
ARKRERTYTFCHH

SEQ ID NO: 594 - protein, 13 aa, Artificial Sequence
  Description of Artificial Sequence: Synthetic peptide
  N-term H or Acetyl
  MOD_RES (9)..(9): Ser or Phospho-Ser
  MOD_RES (11)..(11): Modified Cys
  See specification as filed for detailed description of substitutions and preferred embodiments
ARKRERAYSFCHH

SEQ ID NO: 595 - protein, 20 aa, Artificial Sequence
  Description of Artificial Sequence: Synthetic peptide
  N-term H or Acetyl
  MOD_RES (6)..(6): Ser or Phospho-Ser
  MOD_RES (8)..(8): Modified Cys
  See specification as filed for detailed description of substitutions and preferred embodiments
KKKRFSFCKSFKLSGFSFKK

SEQ ID NO: 596 - protein, 20 aa, Artificial Sequence
  Description of Artificial Sequence: Synthetic peptide
  N-term H or Acetyl
  MOD_RES (8)..(8): Modified Cys
  MOD_RES (10)..(10): Ser or Phospho-Ser
  See specification as filed for detailed description of substitutions and preferred embodiments
KKKRFSFCKSFKLSGFSFKK

SEQ ID NO: 597 - protein, 20 aa, Artificial Sequence
  Description of Artificial Sequence: Synthetic peptide
  N-term H or Acetyl
  MOD_RES (10)..(10): Thr or Phospho-Thr
  MOD_RES (12)..(12): Modified Cys
  See specification as filed for detailed description of substitutions and preferred embodiments
MFAVRDRRQTVCKGVIKAVD

SEQ ID NO: 598 - protein, 20 aa, Artificial Sequence
  Description of Artificial Sequence: Synthetic peptide
  N-term H or Acetyl
  MOD_RES (15)..(15): Ser or Phospho-Ser
  MOD_RES (17)..(17): Modified Cys
  See specification as filed for detailed description of substitutions and preferred embodiments
KGTLVQTKGTGASGSFCLNK

SEQ ID NO: 599 - protein, 20 aa, Artificial Sequence
  Description of Artificial Sequence: Synthetic peptide
  N-term H or Acetyl
  MOD_RES (10)..(10): Ser or Phospho-Ser
  MOD_RES (12)..(12): Modified Cys
  See specification as filed for detailed description of substitutions and preferred embodiments
KKKRFSFKKSFCLSGFSFKK

SEQ ID NO: 600 - protein, 20 aa, Artificial Sequence
  Description of Artificial Sequence: Synthetic peptide
  N-term H or Acetyl
  MOD_RES (12)..(12): Modified Cys
  MOD_RES (14)..(14): Ser or Phospho-Ser
  See specification as filed for detailed description of substitutions and preferred embodiments
KKKRFSFKKSFCLSGFSFKK

SEQ ID NO: 601 - protein, 20 aa, Artificial Sequence
  Description of Artificial Sequence: Synthetic peptide
  N-term H or Acetyl
  MOD_RES (10)..(10): Thr or Phospho-Thr
  MOD_RES (12)..(12): Modified Cys
  See specification as filed for detailed description of substitutions and preferred embodiments
RFAVRDMRQTVCVGVIKAVD

SEQ ID NO: 602 - protein, 20 aa, Artificial Sequence
  Description of Artificial Sequence: Synthetic peptide
  N-term H or Acetyl
  MOD_RES (4)..(4): Modified Cys
  MOD_RES (6)..(6): Ser or Phospho-Ser
  See specification as filed for detailed description of substitutions and preferred embodiments
KKKCFSFKKSFKLSGFSFKK

SEQ ID NO: 603 - protein, 20 aa, Artificial Sequence
  Description of Artificial Sequence: Synthetic peptide
  N-term H or Acetyl
  MOD_RES (16)..(16): Ser or Phospho-Ser
  MOD_RES (18)..(18): Modified Cys
  See specification as filed for detailed description of substitutions and preferred embodiments
KKRFSFKKSFKLSGFSFCKN

SEQ ID NO: 604 - protein, 20 aa, Artificial Sequence
  Description of Artificial Sequence: Synthetic peptide
  N-term H or Acetyl
  MOD_RES (15)..(15): Ser or Phospho-Ser
  MOD_RES (17)..(17): Modified Cys
  See specification as filed for detailed description of substitutions and preferred embodiments
TASQDVANRFARKGSLCQKN

SEQ ID NO: 605 - protein, 12 aa, Artificial Sequence
  Description of Artificial Sequence: Synthetic peptide
  N-term H or Acetyl
  MOD_RES (7)..(7): Ser or Phospho-Ser
  MOD_RES (9)..(9): Modified Cys
  See specification as filed for detailed description of substitutions and preferred embodiments
RFARKGSLCQKN

SEQ ID NO: 606 - protein, 19 aa, Artificial Sequence
  Description of Artificial Sequence: Synthetic peptide
  N-term H or Acetyl
  MOD_RES (6)..(6): Modified Cys
  MOD_RES (8)..(8): Ser or Phospho-Ser
  See specification as filed for detailed description of substitutions and preferred embodiments
KEVPRCKSLVGTPYWMAPE

SEQ ID NO: 607 - protein, 19 aa, Artificial Sequence
  Description of Artificial Sequence: Synthetic peptide
  N-term H or Acetyl
  MOD_RES (6)..(6): Modified Cys
  MOD_RES (8)..(8): Ser or Phospho-Ser
  See specification as filed for detailed description of substitutions and preferred embodiments
KEVPRCKSLVGTPYWMAPE

SEQ ID NO: 608 - protein, 13 aa, Artificial Sequence
  Description of Artificial Sequence: Synthetic peptide
  N-term H or Acetyl
  MOD_RES (9)..(9): Thr or Phospho-Thr
  MOD_RES (11)..(11): Modified Cys
  See specification as filed for detailed description of substitutions and preferred embodiments
KKALRRQETVCAL

SEQ ID NO: 609 - protein, 11 aa, Artificial Sequence
  Description of Artificial Sequence: Synthetic peptide
  N-term H or Acetyl
  MOD_RES (7)..(7): Ser or Phospho-Ser
  MOD_RES (9)..(9): Modified Cys
  See specification as filed for detailed description of substitutions and preferred embodiments
KLNRVFSVCVA

SEQ ID NO: 610 - protein, 13 aa, Artificial Sequence
  Description of Artificial Sequence: Synthetic peptide
  N-term H or Acetyl
  MOD_RES (9)..(9): Ser or Phospho-Ser
  MOD_RES (11)..(11): Modified Cys
  See specification as filed for detailed description of substitutions and preferred embodiments
TRPRKRQGSFCRR

SEQ ID NO: 611 - protein, 19 aa, Artificial Sequence
  Description of Artificial Sequence: Synthetic peptide
  N-term H or Acetyl
  MOD_RES (9)..(9): Thr or Phospho-Thr
  MOD_RES (11)..(11): Modified Cys
  See specification as filed for detailed description of substitutions and preferred embodiments
KKRFSFKKTFCLSGFSFKK

SEQ ID NO: 612 - protein, 13 aa, Artificial Sequence
  Description of Artificial Sequence: Synthetic peptide
  N-term H or Acetyl
  MOD_RES (9)..(9): Ser or Phospho-Ser
  MOD_RES (11)..(11): Modified Cys
  See specification as filed for detailed description of substitutions and preferred embodiments
ARKRERAYSFCVG

SEQ ID NO: 613 - protein, 13 aa, Artificial Sequence
  Description of Artificial Sequence: Synthetic peptide
  N-term H or Acetyl
  MOD_RES (8)..(8): Ser or Phospho-Ser
  MOD_RES (10)..(10): Modified Cys
  See specification as filed for detailed description of substitutions and preferred embodiments
ARKKWKQSVCLIS

SEQ ID NO: 614 - protein, 15 aa, Artificial Sequence
  Description of Artificial Sequence: Synthetic peptide
  N-term H or Acetyl
  MOD_RES (8)..(8): Thr or Phospho-Thr
  MOD_RES (10)..(10): Modified Cys
  See specification as filed for detailed description of substitutions and preferred embodiments
DNKLRRYTTCSKRKT

SEQ ID NO: 615 - protein, 15 aa, Artificial Sequence
  Description of Artificial Sequence: Synthetic peptide
  N-term H or Acetyl
  MOD_RES (8)..(8): Thr or Phospho-Thr
  MOD_RES (10)..(10): Modified Cys
  See specification as filed for detailed description of substitutions and preferred embodiments
EPPLSQETFCDLWKL

SEQ ID NO: 616 - protein, 15 aa, Artificial Sequence
  Description of Artificial Sequence: Synthetic peptide
  N-term H or Acetyl
  MOD_RES (8)..(8): Ser or Phospho-Ser
  MOD_RES (10)..(10): Modified Cys
  See specification as filed for detailed description of substitutions and preferred embodiments
IIMDSSISKCALSEI

SEQ ID NO: 617 - protein, 15 aa, Artificial Sequence
  Description of Artificial Sequence: Synthetic peptide
  N-term H or Acetyl
  MOD_RES (8)..(8): Ser or Phospho-Ser
  MOD_RES (10)..(10): Modified Cys
  See specification as filed for detailed description of substitutions and preferred embodiments
KTIERRYSDCTTLVA

SEQ ID NO: 618 - protein, 15 aa, Artificial Sequence
  Description of Artificial Sequence: Synthetic peptide
  N-term H or Acetyl
  MOD_RES (6)..(6): Modified Cys
  MOD_RES (8)..(8): Thr or Phospho-Thr
  See specification as filed for detailed description of substitutions and preferred embodiments
LSRRLCVTGDLFDIM

SEQ ID NO: 619 - protein, 15 aa, Artificial Sequence
  Description of Artificial Sequence: Synthetic peptide
  N-term H or Acetyl
  MOD_RES (8)..(8): Ser or Phospho-Ser
  MOD_RES (10)..(10): Modified Cys
  See specification as filed for detailed description of substitutions and preferred embodiments
NKLRRQHSYCTFVDL

SEQ ID NO: 620 - protein, 15 aa, Artificial Sequence
  Description of Artificial Sequence: Synthetic peptide
  N-term H or Acetyl
  MOD_RES (6)..(6): Modified Cys
  MOD_RES (8)..(8): Ser or Phospho-Ser
  See specification as filed for detailed description of substitutions and preferred embodiments
RREERCLSAPGNLLT

SEQ ID NO: 621 - protein, 15 aa, Artificial Sequence
  Description of Artificial Sequence: Synthetic peptide
  N-term H or Acetyl
  MOD_RES (8)..(8): Ser or Phospho-Ser
  MOD_RES (10)..(10): Modified Cys
  See specification as filed for detailed description of substitutions and preferred embodiments
KRPQRATSNCFAMFD

SEQ ID NO: 622 - protein, 14 aa, Artificial Sequence
  Description of Artificial Sequence: Synthetic peptide
  N-term H or Acetyl
  MOD_RES (8)..(8): Ser or Phospho-Ser
  MOD_RES (10)..(10): Modified Cys
  See specification as filed for detailed description of substitutions and preferred embodiments
VRRRWKLSFCIVSL

SEQ ID NO: 623 - protein, 15 aa, Artificial Sequence
  Description of Artificial Sequence: Synthetic peptide
  N-term H or Acetyl
  MOD_RES (8)..(8): Thr or Phospho-Thr
  MOD_RES (10)..(10): Modified Cys
  See specification as filed for detailed description of substitutions and preferred embodiments
MSSKRTKTKCKKRPQ

SEQ ID NO: 624 - protein, 15 aa, Artificial Sequence
  Description of Artificial Sequence: Synthetic peptide
  N-term H or Acetyl
  MOD_RES (8)..(8): Thr or Phospho-Thr
  MOD_RES (10)..(10): Modified Cys
  See specification as filed for detailed description of substitutions and preferred embodiments
ARQSRRSTQCVTLTD

SEQ ID NO: 625 - protein, 15 aa, Artificial Sequence
  Description of Artificial Sequence: Synthetic peptide
  N-term H or Acetyl
  MOD_RES (8)..(8): Tyr or Phospho-Tyr
  MOD_RES (10)..(10): Modified Cys
  See specification as filed for detailed description of substitutions and preferred embodiments
DKKGNFNYICFTRIL

SEQ ID NO: 626 - protein, 15 aa, Artificial Sequence
  Description of Artificial Sequence: Synthetic peptide
  N-term H or Acetyl
  MOD_RES (8)..(8): Thr or Phospho-Thr
  MOD_RES (10)..(10): Modified Cys
  See specification as filed for detailed description of substitutions and preferred embodiments
EFKNIFGTPCFVAPE

SEQ ID NO: 627 - protein, 15 aa, Artificial Sequence
  Description of Artificial Sequence: Synthetic peptide
  N-term H or Acetyl
  MOD_RES (8)..(8): Ser or Phospho-Ser
  MOD_RES (10)..(10): Modified Cys
  See specification as filed for detailed description of substitutions and preferred embodiments
EYTIKSHSSCPPNNS

SEQ ID NO: 628 - protein, 15 aa, Artificial Sequence
  Description of Artificial Sequence: Synthetic peptide
  N-term H or Acetyl
  MOD_RES (8)..(8): Thr or Phospho-Thr
  MOD_RES (10)..(10): Modified Cys
  See specification as filed for detailed description of substitutions and preferred embodiments
KDPKRRMTICQSLEH

SEQ ID NO: 629 - protein, 15 aa, Artificial Sequence
  Description of Artificial Sequence: Synthetic peptide
  N-term H or Acetyl
  MOD_RES (8)..(8): Thr or Phospho-Thr
  MOD_RES (10)..(10): Modified Cys
  See specification as filed for detailed description of substitutions and preferred embodiments
KKRPQRATSCVFAMF

SEQ ID NO: 630 - protein, 15 aa, Artificial Sequence
  Description of Artificial Sequence: Synthetic peptide
  N-term H or Acetyl
  MOD_RES (6)..(6): Modified Cys
  MOD_RES (8)..(8): Thr or Phospho-Thr
  See specification as filed for detailed description of substitutions and preferred embodiments
KQTARCSTGGKAPRK

SEQ ID NO: 631 - protein, 15 aa, Artificial Sequence
  Description of Artificial Sequence: Synthetic peptide
  N-term H or Acetyl
  MOD_RES (8)..(8): Thr or Phospho-Thr
  MOD_RES (10)..(10): Modified Cys
  See specification as filed for detailed description of substitutions and preferred embodiments
LGETKQETLCNISAV

SEQ ID NO: 632 - protein, 15 aa, Artificial Sequence
  Description of Artificial Sequence: Synthetic peptide
  N-term H or Acetyl
  MOD_RES (8)..(8): Thr or Phospho-Thr
  MOD_RES (10)..(10): Modified Cys
  See specification as filed for detailed description of substitutions and preferred embodiments
PERRRLKTTCLKEYT

SEQ ID NO: 633 - protein, 15 aa, Artificial Sequence
  Description of Artificial Sequence: Synthetic peptide
  N-term H or Acetyl
  MOD_RES (8)..(8): Ser or Phospho-Ser
  MOD_RES (10)..(10): Modified Cys
  See specification as filed for detailed description of substitutions and preferred embodiments
PYHFRAPSRCFWRTV

SEQ ID NO: 634 - protein, 15 aa, Artificial Sequence
  Description of Artificial Sequence: Synthetic peptide
  N-term H or Acetyl
  MOD_RES (8)..(8): Thr or Phospho-Thr
  MOD_RES (10)..(10): Modified Cys
  See specification as filed for detailed description of substitutions and preferred embodiments
QGRKRRQTSCTDFYH

SEQ ID NO: 635 - protein, 15 aa, Artificial Sequence
  Description of Artificial Sequence: Synthetic peptide
  N-term H or Acetyl
  MOD_RES (8)..(8): Ser or Phospho-Ser
  MOD_RES (10)..(10): Modified Cys
  See specification as filed for detailed description of substitutions and preferred embodiments
RPREKRRSTCVSFWT

SEQ ID NO: 636 - protein, 15 aa, Artificial Sequence
  Description of Artificial Sequence: Synthetic peptide
  N-term H or Acetyl
  MOD_RES (8)..(8): Ser or Phospho-Ser
  MOD_RES (10)..(10): Modified Cys
  See specification as filed for detailed description of substitutions and preferred embodiments
RQRKRHKSDCISLSF

SEQ ID NO: 637 - protein, 15 aa, Artificial Sequence
  Description of Artificial Sequence: Synthetic peptide
  N-term H or Acetyl
  MOD_RES (6)..(6): Modified Cys
  MOD_RES (8)..(8): Ser or Phospho-Ser
  See specification as filed for detailed description of substitutions and preferred embodiments
SSRRRCISETEENSD

SEQ ID NO: 638 - protein, 15 aa, Artificial Sequence
  Description of Artificial Sequence: Synthetic peptide
  N-term H or Acetyl
  MOD_RES (8)..(8): Thr or Phospho-Thr
  MOD_RES (10)..(10): Modified Cys
  See specification as filed for detailed description of substitutions and preferred embodiments
TIGRSRSTRCREQEN

SEQ ID NO: 639 - protein, 15 aa, Artificial Sequence
  Description of Artificial Sequence: Synthetic peptide
  N-term H or Acetyl
  MOD_RES (8)..(8): Thr or Phospho-Thr
  MOD_RES (10)..(10): Modified Cys
  See specification as filed for detailed description of substitutions and preferred embodiments
TTMGDRFTDCEVDEL

SEQ ID NO: 640 - protein, 15 aa, Artificial Sequence
  Description of Artificial Sequence: Synthetic peptide
  N-term H or Acetyl
  MOD_RES (6)..(6): Modified Cys
  MOD_RES (8)..(8): Thr or Phospho-Thr
  See specification as filed for detailed description of substitutions and preferred embodiments
TTRLKCYTIKSHSSL

SEQ ID NO: 641 - protein, 15 aa, Artificial Sequence
  Description of Artificial Sequence: Synthetic peptide
  N-term H or Acetyl
  MOD_RES (8)..(8): Ser or Phospho-Ser
  MOD_RES (10)..(10): Modified Cys
  See specification as filed for detailed description of substitutions and preferred embodiments
PLSQETFSDCWKLLP

SEQ ID NO: 642 - protein, 15 aa, Artificial Sequence
  Description of Artificial Sequence: Synthetic peptide
  N-term H or Acetyl
  MOD_RES (8)..(8): Ser or Phospho-Ser
  MOD_RES (10)..(10): Modified Cys
  See specification as filed for detailed description of substitutions and preferred embodiments
ENIPEDSSMCSKRFR

SEQ ID NO: 643 - protein, 15 aa, Artificial Sequence
  Description of Artificial Sequence: Synthetic peptide
  N-term H or Acetyl
  MOD_RES (8)..(8): Ser or Phospho-Ser
  MOD_RES (10)..(10): Modified Cys
  See specification as filed for detailed description of substitutions and preferred embodiments
PEDSSMVSKCFRFDD

SEQ ID NO: 644 - protein, 15 aa, Artificial Sequence
  Description of Artificial Sequence: Synthetic peptide
  N-term H or Acetyl
  MOD_RES (6)..(6): Modified Cys
  MOD_RES (8)..(8): Ser or Phospho-Ser
  See specification as filed for detailed description of substitutions and preferred embodiments
RFDCRCISGLLTTTP

SEQ ID NO: 645 - protein, 15 aa, Artificial Sequence
  Description of Artificial Sequence: Synthetic peptide
  N-term H or Acetyl
  MOD_RES (6)..(6): Modified Cys
  MOD_RES (8)..(8): Ser or Phospho-Ser
  See specification as filed for detailed description of substitutions and preferred embodiments
RRRFDCRSISGLLTT

SEQ ID NO: 646 - protein, 13 aa, Artificial Sequence
  Description of Artificial Sequence: Synthetic peptide
  N-term H or Acetyl
  MOD_RES (8)..(8): Ser or Phospho-Ser
  MOD_RES (10)..(10): Modified Cys
  See specification as filed for detailed description of substitutions and preferred embodiments
SEDKTSKSSCNGT

SEQ ID NO: 647 - protein, 15 aa, Artificial Sequence
  Description of Artificial Sequence: Synthetic peptide
  N-term H or Acetyl
  MOD_RES (5)..(5): Modified Cys
  MOD_RES (8)..(8): Thr or Phospho-Thr
  See specification as filed for detailed description of substitutions and preferred embodiments
SKSSCNGTCGDREDK

SEQ ID NO: 648 - protein, 14 aa, Artificial Sequence
  Description of Artificial Sequence: Synthetic peptide
  N-term H or Acetyl
  MOD_RES (10)..(10): Ser or Phospho-Ser
  MOD_RES (12)..(12): Modified Cys
  See specification as filed for detailed description of substitutions and preferred embodiments
KKRAARASTSNCRR

SEQ ID NO: 649 - protein, 13 aa, Artificial Sequence
  Description of Artificial Sequence: Synthetic peptide
  N-term H or Acetyl
  MOD_RES (5)..(5): Modified Cys
  MOD_RES (7)..(7): Ser or Phospho-Ser
  See specification as filed for detailed description of substitutions and preferred embodiments
ILSRCPSYRKILN

SEQ ID NO: 650 - protein, 13 aa, Artificial Sequence
  Description of Artificial Sequence: Synthetic peptide
  N-term H or Acetyl
  MOD_RES (7)..(7): Ser or Phospho-Ser
  MOD_RES (9)..(9): Modified Cys
  See specification as filed for detailed description of substitutions and preferred embodiments
PLRRTLSVCASPS

SEQ ID NO: 651 - protein, 15 aa, Artificial Sequence
  Description of Artificial Sequence: Synthetic peptide
  N-term H or Acetyl
  MOD_RES (12)..(12): Ser or Phospho-Ser
  MOD_RES (14)..(14): Modified Cys
  See specification as filed for detailed description of substitutions and preferred embodiments
HAAIGDDDDAYSICA

SEQ ID NO: 652 - protein, 12 aa, Artificial Sequence
  Description of Artificial Sequence: Synthetic peptide
  N-term H or Acetyl
  MOD_RES (3)..(3): Modified Cys
  MOD_RES (6)..(6): Ser or Phospho-Ser
  See specification as filed for detailed description of substitutions and preferred embodiments
KKCRLSPGRRRK

SEQ ID NO: 653 - protein, 17 aa, Artificial Sequence
  Description of Artificial Sequence: Synthetic peptide
  N-term H or Acetyl
  MOD_RES (7)..(7): Thr or Phospho-Thr
  MOD_RES (9)..(9): Modified Cys
  See specification as filed for detailed description of substitutions and preferred embodiments
QGKFLQTFCGSPLYRRR

SEQ ID NO: 654 - protein, 13 aa, Artificial Sequence
  Description of Artificial Sequence: Synthetic peptide
  N-term H or Acetyl
  MOD_RES (5)..(5): Modified Cys
  MOD_RES (7)..(7): Ser or Phospho-Ser
  See specification as filed for detailed description of substitutions and preferred embodiments
GRDKCKSLRQIRQ

SEQ ID NO: 655 - protein, 15 aa, Artificial Sequence
  Description of Artificial Sequence: Synthetic peptide
  N-term H or Acetyl
  MOD_RES (4)..(4): Modified Cys
  MOD_RES (6)..(6): Ser or Phospho-Ser
  MOD_RES (10)..(10): Ser or Phospho-Ser
  See specification as filed for detailed description of substitutions and preferred embodiments
LSRCSSPHQSEDEEE

SEQ ID NO: 656 - protein, 17 aa, Artificial Sequence
  Description of Artificial Sequence: Synthetic peptide
  N-term H or Acetyl
  MOD_RES (3)..(3): Modified Cys
  MOD_RES (5)..(5): Ser or Phospho-Ser
  MOD_RES (9)..(9): Ser or Phospho-Ser
  See specification as filed for detailed description of substitutions and preferred embodiments
SRCSSPHQSEDEEEPRD

SEQ ID NO: 657 - protein, 15 aa, Artificial Sequence
  Description of Artificial Sequence: Synthetic peptide
  N-term H or Acetyl
  MOD_RES (2)..(2): Thr or Phospho-Thr
  MOD_RES (4)..(4): Modified Cys
  See specification as filed for detailed description of substitutions and preferred embodiments
GTFCAAIRRLAARRR

SEQ ID NO: 658 - protein, 11 aa, Artificial Sequence
  Description of Artificial Sequence: Synthetic peptide
  N-term H or Acetyl
  MOD_RES (6)..(6): Ser or Phospho-Ser
  MOD_RES (8)..(8): Modified Cys
  See specification as filed for detailed description of substitutions and preferred embodiments
KTGPLSPCPFK

SEQ ID NO: 659 - protein, 17 aa, Artificial Sequence
  Description of Artificial Sequence: Synthetic peptide
  N-term H or Acetyl
  MOD_RES (5)..(5): Ser or Phospho-Ser
  MOD_RES (7)..(7): Modified Cys
  See specification as filed for detailed description of substitutions and preferred embodiments
GLYRSPCMPENLNRPRL

SEQ ID NO: 660 - protein, 21 aa, Artificial Sequence
  Description of Artificial Sequence: Synthetic peptide
  N-term H or Acetyl
  MOD_RES (7)..(7): Modified Cys
  MOD_RES (9)..(9): Thr or Phospho-Thr
  See specification as filed for detailed description of substitutions and preferred embodiments
KRELVECLTPSGEAPNQALLR

SEQ ID NO: 661 - protein, 11 aa, Artificial Sequence
  Description of Artificial Sequence: Synthetic peptide
  N-term H or Acetyl
  MOD_RES (7)..(7): Ser or Phospho-Ser
  MOD_RES (9)..(9): Modified Cys
  See specification as filed for detailed description of substitutions and preferred embodiments
GDQDYLSLCVG

SEQ ID NO: 662 - protein, 13 aa, Artificial Sequence
  Description of Artificial Sequence: Synthetic peptide
  N-term H or Acetyl
  MOD_RES (7)..(7): Ser or Phospho-Ser
  MOD_RES (9)..(9): Modified Cys
  See specification as filed for detailed description of substitutions and preferred embodiments
ILSRRPSYCKILN

SEQ ID NO: 663 - protein, 16 aa, Artificial Sequence
  Description of Artificial Sequence: Synthetic peptide
  N-term H or Acetyl
  MOD_RES (9)..(9): Ser or Phospho-Ser
  MOD_RES (11)..(11): Modified Cys
  See specification as filed for detailed description of substitutions and preferred embodiments
QLIDSMANSFCGTRRR

SEQ ID NO: 664 - protein, 20 aa, Artificial Sequence
  Description of Artificial Sequence: Synthetic peptide
  N-term H or Acetyl
  MOD_RES (12)..(12): Ser or Phospho-Ser
  MOD_RES (14)..(14): Modified Cys
  See specification as filed for detailed description of substitutions and preferred embodiments
KKERLLDDRHDSGCDSMDEE

SEQ ID NO: 665 - protein, 20 aa, Artificial Sequence
  Description of Artificial Sequence: Synthetic peptide
  N-term H or Acetyl
  MOD_RES (16)..(16): Ser or Phospho-Ser
  MOD_RES (18)..(18): Modified Cys
  See specification as filed for detailed description of substitutions and preferred embodiments
KKERLLDDRHDSGLDSMCEE

SEQ ID NO: 666 - protein, 15 aa, Artificial Sequence
  Description of Artificial Sequence: Synthetic peptide
  N-term H or Acetyl
  MOD_RES (6)..(6): Modified Cys
  MOD_RES (8)..(8): Ser or Phospho-Ser
  See specification as filed for detailed description of substitutions and preferred embodiments
QDLDECVSQEDVPLV

SEQ ID NO: 667 - protein, 15 aa, Artificial Sequence
  Description of Artificial Sequence: Synthetic peptide
  N-term H or Acetyl
  MOD_RES (8)..(8): Thr or Phospho-Thr
  MOD_RES (10)..(10): Modified Cys
  See specification as filed for detailed description of substitutions and preferred embodiments
ISAQIGATLCRRLSF

SEQ ID NO: 668 - protein, 14 aa, Artificial Sequence
  Description of Artificial Sequence: Synthetic peptide
  N-term H or Acetyl
  MOD_RES (8)..(8): Ser or Phospho-Ser
  MOD_RES (10)..(10): Modified Cys
  See specification as filed for detailed description of substitutions and preferred embodiments
WHKTTQMSACGTYA

SEQ ID NO: 669 - protein, 15 aa, Artificial Sequence
  Description of Artificial Sequence: Synthetic peptide
  N-term H or Acetyl
  MOD_RES (8)..(8): Ser or Phospho-Ser
  MOD_RES (10)..(10): Modified Cys
  See specification as filed for detailed description of substitutions and preferred embodiments
SGRPRTTSFCESCKP

SEQ ID NO: 670 - protein, 20 aa, Artificial Sequence
  Description of Artificial Sequence: Synthetic peptide
  N-term H or Acetyl
  MOD_RES (5)..(5): Modified Cys
  MOD_RES (7)..(7): Ser or Phospho-Ser
  See specification as filed for detailed description of substitutions and preferred embodiments
RSGLCRSPSMPENLNRPRLK

SEQ ID NO: 671 - protein, 21 aa, Artificial Sequence
  Description of Artificial Sequence: Synthetic peptide
  N-term H or Acetyl
  MOD_RES (15)..(15): Ser or Phospho-Ser
  MOD_RES (17)..(17): Modified Cys
  See specification as filed for detailed description of substitutions and preferred embodiments
KDQEAKVSRSGLYRSPCMPEN

SEQ ID NO: 672 - protein, 19 aa, Artificial Sequence
  Description of Artificial Sequence: Synthetic peptide
  N-term H or Acetyl
  MOD_RES (3)..(3): Modified Cys
  MOD_RES (6)..(6): Thr or Phospho-Thr
  See specification as filed for detailed description of substitutions and preferred embodiments
DECEGTFRSSIRRLSSRRR

SEQ ID NO: 673 - protein, 19 aa, Artificial Sequence
  Description of Artificial Sequence: Synthetic peptide
  N-term H or Acetyl
  MOD_RES (4)..(4): Modified Cys
  MOD_RES (6)..(6): Thr or Phospho-Thr
  See specification as filed for detailed description of substitutions and preferred embodiments
DEECGTFRSSIRRLSSRRR

SEQ ID NO: 674 - protein, 19 aa, Artificial Sequence
  Description of Artificial Sequence: Synthetic peptide
  N-term H or Acetyl
  MOD_RES (6)..(6): Thr or Phospho-Thr
  MOD_RES (8)..(8): Modified Cys
  See specification as filed for detailed description of substitutions and preferred embodiments
DEEEGTFCSSIRRLSSRRR

SEQ ID NO: 675 - protein, 19 aa, Artificial Sequence
  Description of Artificial Sequence: Synthetic peptide
  N-term H or Acetyl
  MOD_RES (3)..(3): Modified Cys
  MOD_RES (6)..(6): Thr or Phospho-Thr
  See specification as filed for detailed description of substitutions and preferred embodiments
DECEGTFRAAIRRLAARRR

SEQ ID NO: 676 - protein, 19 aa, Artificial Sequence
  Description of Artificial Sequence: Synthetic peptide
  N-term H or Acetyl
  MOD_RES (4)..(4): Modified Cys
  MOD_RES (6)..(6): Thr or Phospho-Thr
  See specification as filed for detailed description of substitutions and preferred embodiments
DEECGTFRAAIRRLAARRR

SEQ ID NO: 677 - protein, 19 aa, Artificial Sequence
  Description of Artificial Sequence: Synthetic peptide
  N-term H or Acetyl
  MOD_RES (6)..(6): Thr or Phospho-Thr
  MOD_RES (8)..(8): Modified Cys
  See specification as filed for detailed description of substitutions and preferred embodiments
DEEEGTFCAAIRRLAARRR

SEQ ID NO: 678 - protein, 17 aa, Artificial Sequence
  Description of Artificial Sequence: Synthetic peptide
  N-term H or Acetyl
  MOD_RES (5)..(5): Modified Cys
  MOD_RES (7)..(7): Thr or Phospho-Thr
  See specification as filed for detailed description of substitutions and preferred embodiments
QGKFCQTFCGSPLYRRR

SEQ ID NO: 679 - protein, 14 aa, Artificial Sequence
  Description of Artificial Sequence: Synthetic peptide
  N-term H or Acetyl
  MOD_RES (6)..(6): Tyr or Phospho-Tyr
  MOD_RES (8)..(8): Modified Cys
  See specification as filed for detailed description of substitutions and preferred embodiments
HVNATYVCVKCVAP

SEQ ID NO: 680 - protein, 10 aa, Artificial Sequence
  Description of Artificial Sequence: Synthetic peptide
  N-term H or Acetyl
  MOD_RES (8)..(8): Ser or Phospho-Ser
  MOD_RES (10)..(10): Modified Cys
  See specification as filed for detailed description of substitutions and preferred embodiments
CKRRRLASLC

SEQ ID NO: 681 - protein, 15 aa, Artificial Sequence
  Description of Artificial Sequence: Synthetic peptide
  N-term H or Acetyl
  MOD_RES (6)..(6): Modified Cys
  MOD_RES (8)..(8): Tyr or Phospho-Tyr
  See specification as filed for detailed description of substitutions and preferred embodiments
NTFIGCPYWMAPEVI

SEQ ID NO: 682 - protein, 15 aa, Artificial Sequence
  Description of Artificial Sequence: Synthetic peptide
  N-term H or Acetyl
  MOD_RES (8)..(8): Thr or Phospho-Thr
  MOD_RES (10)..(10): Modified Cys
  See specification as filed for detailed description of substitutions and preferred embodiments
RRNTFIGTPCWMAPE

SEQ ID NO: 683 - protein, 15 aa, Artificial Sequence
  Description of Artificial Sequence: Synthetic peptide
  N-term H or Acetyl
  MOD_RES (8)..(8): Thr or Phospho-Thr
  MOD_RES (10)..(10): Modified Cys
  See specification as filed for detailed description of substitutions and preferred embodiments
RTVGRRNTFCGTPYW

SEQ ID NO: 684 - protein, 13 aa, Artificial Sequence
  Description of Artificial Sequence: Synthetic peptide
  N-term H or Acetyl
  MOD_RES (5)..(5): Modified Cys
  MOD_RES (7)..(7): Thr or Phospho-Thr
  See specification as filed for detailed description of substitutions and preferred embodiments
GRDKCKTLRQIRQ

SEQ ID NO: 685 - protein, 16 aa, Artificial Sequence
  Description of Artificial Sequence: Synthetic peptide
  N-term H or Acetyl
  MOD_RES (5)..(5): Ser or Phospho-Ser
  MOD_RES (7)..(7): Modified Cys
  See specification as filed for detailed description of substitutions and preferred embodiments
QLIDSMCNSFVGTRRR

SEQ ID NO: 686 - protein, 16 aa, Artificial Sequence
  Description of Artificial Sequence: Synthetic peptide
  N-term H or Acetyl
  MOD_RES (7)..(7): Modified Cys
  MOD_RES (9)..(9): Ser or Phospho-Ser
  See specification as filed for detailed description of substitutions and preferred embodiments
QLIDSMCNSFVGTRRR

SEQ ID NO: 687 - protein, 14 aa, Artificial Sequence
  Description of Artificial Sequence: Synthetic peptide
  N-term H or Acetyl
  MOD_RES (4)..(4): Modified Cys
  MOD_RES (6)..(6): Ser or Phospho-Ser
  See specification as filed for detailed description of substitutions and preferred embodiments
RALCDSFRRRDTAQ

SEQ ID NO: 688 - protein, 12 aa, Artificial Sequence
  Description of Artificial Sequence: Synthetic peptide
  N-term H or Acetyl
  MOD_RES (8)..(8): Ser or Phospho-Ser
  MOD_RES (10)..(10): Modified Cys
  See specification as filed for detailed description of substitutions and preferred embodiments
KLRALTDSFCRR

SEQ ID NO: 689 - protein, 15 aa, Artificial Sequence
  Description of Artificial Sequence: Synthetic peptide
  N-term H or Acetyl
  MOD_RES (8)..(8): Ser or Phospho-Ser
  MOD_RES (10)..(10): Modified Cys
  See specification as filed for detailed description of substitutions and preferred embodiments
SFLSRSKSFCPLLHY

SEQ ID NO: 690 - protein, 15 aa, Artificial Sequence
  Description of Artificial Sequence: Synthetic peptide
  N-term H or Acetyl
  MOD_RES (6)..(6): Modified Cys
  MOD_RES (8)..(8): Ser or Phospho-Ser
  See specification as filed for detailed description of substitutions and preferred embodiments
SFLSRCKSFSPLLHY

SEQ ID NO: 691 - protein, 15 aa, Artificial Sequence
  Description of Artificial Sequence: Synthetic peptide
  N-term H or Acetyl
  MOD_RES (8)..(8): Ser or Phospho-Ser
  MOD_RES (10)..(10): Modified Cys
  See specification as filed for detailed description of substitutions and preferred embodiments
SFLSRSKSFCPLLHL

SEQ ID NO: 692 - protein, 15 aa, Artificial Sequence
  Description of Artificial Sequence: Synthetic peptide
  N-term H or Acetyl
  MOD_RES (6)..(6): Modified Cys
  MOD_RES (8)..(8): Ser or Phospho-Ser
  See specification as filed for detailed description of substitutions and preferred embodiments
SFLSRCKSFRPLLHL

SEQ ID NO: 693 - protein, 15 aa, Artificial Sequence
  Description of Artificial Sequence: Synthetic peptide
  N-term H or Acetyl
  MOD_RES (8)..(8): Ser or Phospho-Ser
  MOD_RES (10)..(10): Modified Cys
  See specification as filed for detailed description of substitutions and preferred embodiments
SGLSRSKSFCRLSHQ

SEQ ID NO: 694 - protein, 15 aa, Artificial Sequence
  Description of Artificial Sequence: Synthetic peptide
  N-term H or Acetyl
  MOD_RES (6)..(6): Modified Cys
  MOD_RES (8)..(8): Ser or Phospho-Ser
  See specification as filed for detailed description of substitutions and preferred embodiments
SGLSRCKSFRRLSHQ

SEQ ID NO: 695 - protein, 15 aa, Artificial Sequence
  Description of Artificial Sequence: Synthetic peptide
  N-term H or Acetyl
  MOD_RES (8)..(8): Ser or Phospho-Ser
  MOD_RES (10)..(10): Modified Cys
  See specification as filed for detailed description of substitutions and preferred embodiments
QHLRLSTSSCRLLYA

SEQ ID NO: 696 - protein, 15 aa, Artificial Sequence
  Description of Artificial Sequence: Synthetic peptide
  N-term H or Acetyl
  MOD_RES (6)..(6): Modified Cys
  MOD_RES (8)..(8): Ser or Phospho-Ser
  See specification as filed for detailed description of substitutions and preferred embodiments
QHLRLCTSSGRLLYA

SEQ ID NO: 697 - protein, 15 aa, Artificial Sequence
  Description of Artificial Sequence: Synthetic peptide
  N-term H or Acetyl
  MOD_RES (8)..(8): Ser or Phospho-Ser
  MOD_RES (10)..(10): Modified Cys
  See specification as filed for detailed description of substitutions and preferred embodiments
PLSTWSGSPCYAAPE

SEQ ID NO: 698 - protein, 15 aa, Artificial Sequence
  Description of Artificial Sequence: Synthetic peptide
  N-term H or Acetyl
  MOD_RES (5)..(5): Modified Cys
  MOD_RES (8)..(8): Ser or Phospho-Ser
  See specification as filed for detailed description of substitutions and preferred embodiments
PLSTCSGSPPYAAPE

SEQ ID NO: 699 - protein, 15 aa, Artificial Sequence
  Description of Artificial Sequence: Synthetic peptide
  N-term H or Acetyl
  MOD_RES (6)..(6): Modified Cys
  MOD_RES (8)..(8): Ser or Phospho-Ser
  See specification as filed for detailed description of substitutions and preferred embodiments
PLSTWCGSPPYAAPE

SEQ ID NO: 700 - protein, 15 aa, Artificial Sequence
  Description of Artificial Sequence: Synthetic peptide
  N-term H or Acetyl
  MOD_RES (8)..(8): Ser or Phospho-Ser
  MOD_RES (10)..(10): Modified Cys
  See specification as filed for detailed description of substitutions and preferred embodiments
PESFSSGSQCVHQKR

SEQ ID NO: 701 - protein, 15 aa, Artificial Sequence
  Description of Artificial Sequence: Synthetic peptide
  N-term H or Acetyl
  MOD_RES (5)..(5): Modified Cys
  MOD_RES (8)..(8): Ser or Phospho-Ser
  See specification as filed for detailed description of substitutions and preferred embodiments
PESFCSGSQDVHQKR

SEQ ID NO: 702 - protein, 15 aa, Artificial Sequence
  Description of Artificial Sequence: Synthetic peptide
  N-term H or Acetyl
  MOD_RES (8)..(8): Ser or Phospho-Ser
  MOD_RES (10)..(10): Modified Cys
  See specification as filed for detailed description of substitutions and preferred embodiments
LLATWSGSPCYAAPE

SEQ ID NO: 703 - protein, 15 aa, Artificial Sequence
  Description of Artificial Sequence: Synthetic peptide
  N-term H or Acetyl
  MOD_RES (8)..(8): Ser or Phospho-Ser
  MOD_RES (10)..(10): Modified Cys
  See specification as filed for detailed description of substitutions and preferred embodiments
SALNRTSSDCALHTS

SEQ ID NO: 704 - protein, 15 aa, Artificial Sequence
  Description of Artificial Sequence: Synthetic peptide
  N-term H or Acetyl
  MOD_RES (6)..(6): Modified Cys
  MOD_RES (8)..(8): Ser or Phospho-Ser
  See specification as filed for detailed description of substitutions and preferred embodiments
SALNRCSSDSALHTS

SEQ ID NO: 705 - protein, 15 aa, Artificial Sequence
  Description of Artificial Sequence: Synthetic peptide
  N-term H or Acetyl
  MOD_RES (7)..(7): Ser or Phospho-Ser
  MOD_RES (9)..(9): Modified Cys
  See specification as filed for detailed description of substitutions and preferred embodiments
AMARAASACALARRR

SEQ ID NO: 706 - protein, 15 aa, Artificial Sequence
  Description of Artificial Sequence: Synthetic peptide
  N-term H or Acetyl
  MOD_RES (5)..(5): Modified Cys
  MOD_RES (7)..(7): Ser or Phospho-Ser
  See specification as filed for detailed description of substitutions and preferred embodiments
AMARCASAAALARRR

SEQ ID NO: 707 - protein, 15 aa, Artificial Sequence
  Description of Artificial Sequence: Synthetic peptide
  N-term H or Acetyl
  MOD_RES (7)..(7): Ser or Phospho-Ser
  MOD_RES (9)..(9): Modified Cys
  See specification as filed for detailed description of substitutions and preferred embodiments
ALNRTSSDCALHRRR

SEQ ID NO: 708 - protein, 15 aa, Artificial Sequence
  Description of Artificial Sequence: Synthetic peptide
  N-term H or Acetyl
  MOD_RES (5)..(5): Modified Cys
  MOD_RES (7)..(7): Ser or Phospho-Ser
  See specification as filed for detailed description of substitutions and preferred embodiments
ALNRCSSDSALHRRR

SEQ ID NO: 709 - protein, 15 aa, Artificial Sequence
  Description of Artificial Sequence: Synthetic peptide
  N-term H or Acetyl
  MOD_RES (8)..(8): Ser or Phospho-Ser
  MOD_RES (10)..(10): Modified Cys
  See specification as filed for detailed description of substitutions and preferred embodiments
PKRSRSSSFCPGTRK

SEQ ID NO: 710 - protein, 15 aa, Artificial Sequence
  Description of Artificial Sequence: Synthetic peptide
  N-term H or Acetyl
  MOD_RES (6)..(6): Modified Cys
  MOD_RES (8)..(8): Ser or Phospho-Ser
  See specification as filed for detailed description of substitutions and preferred embodiments
PKRSRCSSFPPGTRK

SEQ ID NO: 711 - protein, 15 aa, Artificial Sequence
  Description of Artificial Sequence: Synthetic peptide
  N-term H or Acetyl
  MOD_RES (6)..(6): Modified Cys
  MOD_RES (8)..(8): Thr or Phospho-Thr
  See specification as filed for detailed description of substitutions and preferred embodiments
APNVHCNTIEPVNID

SEQ ID NO: 712 - protein, 15 aa, Artificial Sequence
  Description of Artificial Sequence: Synthetic peptide
  N-term H or Acetyl
  MOD_RES (8)..(8): Ser or Phospho-Ser
  MOD_RES (10)..(10): Modified Cys
  See specification as filed for detailed description of substitutions and preferred embodiments
PKALQRLSRCIVRSR

SEQ ID NO: 713 - protein, 15 aa, Artificial Sequence
  Description of Artificial Sequence: Synthetic peptide
  N-term H or Acetyl
  MOD_RES (8)..(8): Ser or Phospho-Ser
  MOD_RES (10)..(10): Modified Cys
  See specification as filed for detailed description of substitutions and preferred embodiments
ALQRLSRSICRSRAH

SEQ ID NO: 714 - protein, 15 aa, Artificial Sequence
  Description of Artificial Sequence: Synthetic peptide
  N-term H or Acetyl
  MOD_RES (8)..(8): Ser or Phospho-Ser
  MOD_RES (10)..(10): Modified Cys
  See specification as filed for detailed description of substitutions and preferred embodiments
LSRSIVRSRCHSTAV

SEQ ID NO: 715 - protein, 15 aa, Artificial Sequence
  Description of Artificial Sequence: Synthetic peptide
  N-term H or Acetyl
  MOD_RES (8)..(8): Ser or Phospho-Ser
  MOD_RES (10)..(10): Modified Cys
  See specification as filed for detailed description of substitutions and preferred embodiments
IVRSRAHSTCVGIFS

SEQ ID NO: 716 - protein, 15 aa, Artificial Sequence
  Description of Artificial Sequence: Synthetic peptide
  N-term H or Acetyl
  MOD_RES (6)..(6): Modified Cys
  MOD_RES (8)..(8): Ser or Phospho-Ser
  See specification as filed for detailed description of substitutions and preferred embodiments
EIRSRCSSYPAGTED

SEQ ID NO: 717 - protein, 15 aa, Artificial Sequence
  Description of Artificial Sequence: Synthetic peptide
  N-term H or Acetyl
  MOD_RES (8)..(8): Thr or Phospho-Thr
  MOD_RES (10)..(10): Modified Cys
  See specification as filed for detailed description of substitutions and preferred embodiments
ARQSRRSTQCVTLTD

SEQ ID NO: 718 - protein, 15 aa, Artificial Sequence
  Description of Artificial Sequence: Synthetic peptide
  N-term H or Acetyl
  MOD_RES (8)..(8): Ser or Phospho-Ser
  MOD_RES (10)..(10): Modified Cys
  MOD_RES (14)..(14): Leu or Nle (i.e. isomer of Leucine)
  See specification as filed for detailed description of substitutions and preferred embodiments
SQRQRSTSTCNVHLV

SEQ ID NO: 719 - protein, 15 aa, Artificial Sequence
  Description of Artificial Sequence: Synthetic peptide
  N-term H or Acetyl
  MOD_RES (8)..(8): Ser or Phospho-Ser
  MOD_RES (10)..(10): Modified Cys
  See specification as filed for detailed description of substitutions and preferred embodiments
PKINRSASECSLHRA

SEQ ID NO: 720 - protein, 15 aa, Artificial Sequence
  Description of Artificial Sequence: Synthetic peptide
  N-term H or Acetyl
  MOD_RES (6)..(6): Modified Cys
  MOD_RES (8)..(8): Ser or Phospho-Ser
  See specification as filed for detailed description of substitutions and preferred embodiments
PKINRCASEPSLHRA

SEQ ID NO: 721 - protein, 15 aa, Artificial Sequence
  Description of Artificial Sequence: Synthetic peptide
  N-term H or Acetyl
  MOD_RES (8)..(8): Thr or Phospho-Thr
  MOD_RES (10)..(10): Modified Cys
  See specification as filed for detailed description of substitutions and preferred embodiments
RKSGKRQTECEKKKK

SEQ ID NO: 722 - protein, 15 aa, Artificial Sequence
  Description of Artificial Sequence: Synthetic peptide
  N-term H or Acetyl
  MOD_RES (8)..(8): Ser or Phospho-Ser
  MOD_RES (10)..(10): Modified Cys
  See specification as filed for detailed description of substitutions and preferred embodiments
RPRGQRDSSCYWEIE

SEQ ID NO: 723 - protein, 15 aa, Artificial Sequence
  Description of Artificial Sequence: Synthetic peptide
  N-term H or Acetyl
  MOD_RES (6)..(6): Modified Cys
  MOD_RES (8)..(8): Ser or Phospho-Ser
  See specification as filed for detailed description of substitutions and preferred embodiments
RPRGQCDSSYYWEIE

SEQ ID NO: 724 - protein, 15 aa, Artificial Sequence
  Description of Artificial Sequence: Synthetic peptide
  N-term H or Acetyl
  MOD_RES (8)..(8): Ser or Phospho-Ser
  MOD_RES (9)..(9): Leu or Nle (i.e. isomer of Leucine)
  MOD_RES (10)..(10): Modified Cys
  See specification as filed for detailed description of substitutions and preferred embodiments
VSGQLIDSLCNSFVG

SEQ ID NO: 725 - protein, 15 aa, Artificial Sequence
  Description of Artificial Sequence: Synthetic peptide
  N-term H or Acetyl
  MOD_RES (6)..(6): Modified Cys
  MOD_RES (8)..(8): Ser or Phospho-Ser
  MOD_RES (9)..(9): Leu or Nle (i.e. isomer of Leucine)
  See specification as filed for detailed description of substitutions and preferred embodiments
VSGQLCDSLANSFVG

SEQ ID NO: 726 - protein, 15 aa, Artificial Sequence
  Description of Artificial Sequence: Synthetic peptide
  N-term H or Acetyl
  MOD_RES (5)..(5): Leu or Nle (i.e. isomer of Leucine)
  MOD_RES (8)..(8): Ser or Phospho-Ser
  MOD_RES (10)..(10): Modified Cys
  See specification as filed for detailed description of substitutions and preferred embodiments
LIDSLANSFCGTRSY

SEQ ID NO: 727 - protein, 15 aa, Artificial Sequence
  Description of Artificial Sequence: Synthetic peptide
  N-term H or Acetyl
  MOD_RES (5)..(5): Leu or Nle (i.e. isomer of Leucine)
  MOD_RES (6)..(6): Modified Cys
  MOD_RES (8)..(8): Ser or Phospho-Ser
  See specification as filed for detailed description of substitutions and preferred embodiments
LIDSLCNSFVGTRSY

SEQ ID NO: 728 - protein, 15 aa, Artificial Sequence
  Description of Artificial Sequence: Synthetic peptide
  N-term H or Acetyl
  MOD_RES (8)..(8): Ser or Phospho-Ser
  MOD_RES (10)..(10): Modified Cys
  See specification as filed for detailed description of substitutions and preferred embodiments
SPRSDRDSFCPLSSL

SEQ ID NO: 729 - protein, 15 aa, Artificial Sequence
  Description of Artificial Sequence: Synthetic peptide
  N-term H or Acetyl
  MOD_RES (6)..(6): Modified Cys
  MOD_RES (8)..(8): Ser or Phospho-Ser
  See specification as filed for detailed description of substitutions and preferred embodiments
SPRSDCDSFRPLSSL

SEQ ID NO: 730 - protein, 14 aa, Artificial Sequence
  Description of Artificial Sequence: Synthetic peptide
  N-term H or Acetyl
  MOD_RES (4)..(4): Leu or Nle (i.e. isomer of Leucine)
  MOD_RES (8)..(8): Thr or Phospho-Thr
  MOD_RES (10)..(10): Modified Cys
  See specification as filed for detailed description of substitutions and preferred embodiments
NVHLVSTTLCVDSR

SEQ ID NO: 731 - protein, 14 aa, Artificial Sequence
  Description of Artificial Sequence: Synthetic peptide
  N-term H or Acetyl
  MOD_RES (4)..(4): Leu or Nle (i.e. isomer of Leucine)
  MOD_RES (6)..(6): Modified Cys
  MOD_RES (8)..(8): Thr or Phospho-Thr
  See specification as filed for detailed description of substitutions and preferred embodiments
NVHLVCTTLPVDSR

SEQ ID NO: 732 - protein, 15 aa, Artificial Sequence
  Description of Artificial Sequence: Synthetic peptide
  N-term H or Acetyl
  MOD_RES (8)..(8): Ser or Phospho-Ser
  MOD_RES (10)..(10): Modified Cys
  See specification as filed for detailed description of substitutions and preferred embodiments
RRRSDDDSPCPSTHK

SEQ ID NO: 733 - protein, 15 aa, Artificial Sequence
  Description of Artificial Sequence: Synthetic peptide
  N-term H or Acetyl
  MOD_RES (6)..(6): Modified Cys
  MOD_RES (8)..(8): Ser or Phospho-Ser
  See specification as filed for detailed description of substitutions and preferred embodiments
RRRSDCDSPRPSTHK

SEQ ID NO: 734 - protein, 15 aa, Artificial Sequence
  Description of Artificial Sequence: Synthetic peptide
  N-term H or Acetyl
  MOD_RES (8)..(8): Ser or Phospho-Ser
  MOD_RES (10)..(10): Modified Cys
  See specification as filed for detailed description of substitutions and preferred embodiments
QNRSGAMSPCSWNSD

SEQ ID NO: 735 - protein, 15 aa, Artificial Sequence
  Description of Artificial Sequence: Synthetic peptide
  N-term H or Acetyl
  MOD_RES (8)..(8): Ser or Phospho-Ser
  MOD_RES (10)..(10): Modified Cys
  See specification as filed for detailed description of substitutions and preferred embodiments
AKELDQGSLCTSFVG

SEQ ID NO: 736 - protein, 15 aa, Artificial Sequence
  Description of Artificial Sequence: Synthetic peptide
  N-term H or Acetyl
  MOD_RES (6)..(6): Leu or Nle (i.e. isomer of Leucine)
  MOD_RES (7)..(7): Leu or Nle (i.e. isomer of Leucine)
  MOD_RES (8)..(8): Thr or Phospho-Thr
  MOD_RES (10)..(10): Modified Cys
  See specification as filed for detailed description of substitutions and preferred embodiments
AGTSFLLTPCVVTRY

SEQ ID NO: 737 - protein, 15 aa, Artificial Sequence
  Description of Artificial Sequence: Synthetic peptide
  N-term H or Acetyl
  MOD_RES (6)..(6): Modified Cys
  MOD_RES (7)..(7): Leu or Nle (i.e. isomer of Leucine)
  MOD_RES (8)..(8): Thr or Phospho-Thr
  See specification as filed for detailed description of substitutions and preferred embodiments
AGTSFCLTPYVVTRY

SEQ ID NO: 738 - protein, 15 aa, Artificial Sequence
  Description of Artificial Sequence: Synthetic peptide
  N-term H or Acetyl
  MOD_RES (6)..(6): Modified Cys
  MOD_RES (7)..(7): Leu or Nle (i.e. isomer of Leucine)
  MOD_RES (8)..(8): Thr or Phospho-Thr
  MOD_RES (10)..(10): Tyr or Phospho-Tyr
  See specification as filed for detailed description of substitutions and preferred embodiments
AGTSFCLTPYVVTRY

SEQ ID NO: 739 - protein, 15 aa, Artificial Sequence
  Description of Artificial Sequence: Synthetic peptide
  N-term H or Acetyl
  MOD_RES (4)..(4): Leu or Nle (i.e. isomer of Leucine)
  MOD_RES (5)..(5): Leu or Nle (i.e. isomer of Leucine)
  MOD_RES (8)..(8): Tyr or Phospho-Tyr
  MOD_RES (10)..(10): Modified Cys
  See specification as filed for detailed description of substitutions and preferred embodiments
TSFLLTPYVCTRYYR

SEQ ID NO: 740 - protein, 15 aa, Artificial Sequence
  Description of Artificial Sequence: Synthetic peptide
  N-term H or Acetyl
  MOD_RES (4)..(4): Leu or Nle (i.e. isomer of Leucine)
  MOD_RES (5)..(5): Leu or Nle (i.e. isomer of Leucine)
  MOD_RES (6)..(6): Thr or Phospho-Thr
  MOD_RES (8)..(8): Tyr or Phospho-Tyr
  MOD_RES (10)..(10): Modified Cys
  See specification as filed for detailed description of substitutions and preferred embodiments
TSFLLTPYVCTRYYR

SEQ ID NO: 741 - protein, 15 aa, Artificial Sequence
  Description of Artificial Sequence: Synthetic peptide
  N-term H or Acetyl
  MOD_RES (8)..(8): Thr or Phospho-Thr
  MOD_RES (10)..(10): Modified Cys
  See specification as filed for detailed description of substitutions and preferred embodiments
ETPPRPRTPCRPLSS

SEQ ID NO: 742 - protein, 15 aa, Artificial Sequence
  Description of Artificial Sequence: Synthetic peptide
  N-term H or Acetyl
  MOD_RES (8)..(8): Thr or Phospho-Thr
  MOD_RES (11)..(11): Modified Cys
  See specification as filed for detailed description of substitutions and preferred embodiments
ARLASKGTGACEFQG

SEQ ID NO: 743 - protein, 15 aa, Artificial Sequence
  Description of Artificial Sequence: Synthetic peptide
  N-term H or Acetyl
  MOD_RES (8)..(8): Thr or Phospho-Thr
  MOD_RES (10)..(10): Modified Cys
  MOD_RES (12)..(12): Leu or Nle (i.e. isomer of Leucine)
  See specification as filed for detailed description of substitutions and preferred embodiments
FQGQLLGTICFLAPE

SEQ ID NO: 744 - protein, 15 aa, Artificial Sequence
  Description of Artificial Sequence: Synthetic peptide
  N-term H or Acetyl
  MOD_RES (7)..(7): Leu or Nle (i.e. isomer of Leucine)
  MOD_RES (8)..(8): Ser or Phospho-Ser
  MOD_RES (10)..(10): Modified Cys
  See specification as filed for detailed description of substitutions and preferred embodiments
NTIDLPLSPCTLDSL

SEQ ID NO: 745 - protein, 14 aa, Artificial Sequence
  Description of Artificial Sequence: Synthetic peptide
  N-term H or Acetyl
  MOD_RES (6)..(6): Modified Cys
  MOD_RES (8)..(8): Tyr or Phospho-Tyr
  See specification as filed for detailed description of substitutions and preferred embodiments
DPGSACPYLKTKFI

SEQ ID NO: 746 - protein, 15 aa, Artificial Sequence
  Description of Artificial Sequence: Synthetic peptide
  N-term H or Acetyl
  MOD_RES (8)..(8): Ser or Phospho-Ser
  MOD_RES (10)..(10): Modified Cys
  See specification as filed for detailed description of substitutions and preferred embodiments
ISGQLVDSICKTRDA

SEQ ID NO: 747 - protein, 15 aa, Artificial Sequence
  Description of Artificial Sequence: Synthetic peptide
  N-term H or Acetyl
  MOD_RES (6)..(6): Modified Cys
  MOD_RES (8)..(8): Ser or Phospho-Ser
  See specification as filed for detailed description of substitutions and preferred embodiments
ISGQLCDSIAKTRDA

SEQ ID NO: 748 - protein, 15 aa, Artificial Sequence
  Description of Artificial Sequence: Synthetic peptide
  N-term H or Acetyl
  MOD_RES (8)..(8): Ser or Phospho-Ser
  MOD_RES (10)..(10): Modified Cys
  See specification as filed for detailed description of substitutions and preferred embodiments
ISGRLVDSKCKTRSA

SEQ ID NO: 749 - protein, 15 aa, Artificial Sequence
  Description of Artificial Sequence: Synthetic peptide
  N-term H or Acetyl
  MOD_RES (6)..(6): Modified Cys
  MOD_RES (8)..(8): Ser or Phospho-Ser
  See specification as filed for detailed description of substitutions and preferred embodiments
ISGRLCDSKAKTRSA

SEQ ID NO: 750 - protein, 15 aa, Artificial Sequence
  Description of Artificial Sequence: Synthetic peptide
  N-term H or Acetyl
  MOD_RES (8)..(8): Ser or Phospho-Ser
  MOD_RES (10)..(10): Modified Cys
  See specification as filed for detailed description of substitutions and preferred embodiments
ISGYLVDSVCKTIDA

SEQ ID NO: 751 - protein, 15 aa, Artificial Sequence
  Description of Artificial Sequence: Synthetic peptide
  N-term H or Acetyl
  MOD_RES (6)..(6): Modified Cys
  MOD_RES (8)..(8): Ser or Phospho-Ser
  See specification as filed for detailed description of substitutions and preferred embodiments
ISGYLCDSVAKTIDA

SEQ ID NO: 752 - protein, 15 aa, Artificial Sequence
  Description of Artificial Sequence: Synthetic peptide
  N-term H or Acetyl
  MOD_RES (8)..(8): Thr or Phospho-Thr
  MOD_RES (10)..(10): Modified Cys
  See specification as filed for detailed description of substitutions and preferred embodiments
LVDSIAKTRCAGSRP

SEQ ID NO: 753 - protein, 15 aa, Artificial Sequence
  Description of Artificial Sequence: Synthetic peptide
  N-term H or Acetyl
  MOD_RES (6)..(6): Modified Cys
  MOD_RES (8)..(8): Thr or Phospho-Thr
  See specification as filed for detailed description of substitutions and preferred embodiments
LVDSICKTRDAGSRP

SEQ ID NO: 754 - protein, 15 aa, Artificial Sequence
  Description of Artificial Sequence: Synthetic peptide
  N-term H or Acetyl
  MOD_RES (8)..(8): Thr or Phospho-Thr
  MOD_RES (10)..(10): Modified Cys
  See specification as filed for detailed description of substitutions and preferred embodiments
LVDSKAKTRCAGSAA

SEQ ID NO: 755 - protein, 15 aa, Artificial Sequence
  Description of Artificial Sequence: Synthetic peptide
  N-term H or Acetyl
  MOD_RES (6)..(6): Modified Cys
  MOD_RES (8)..(8): Thr or Phospho-Thr
  See specification as filed for detailed description of substitutions and preferred embodiments
LVDSKCKTRSAGSAA

SEQ ID NO: 756 - protein, 15 aa, Artificial Sequence
  Description of Artificial Sequence: Synthetic peptide
  N-term H or Acetyl
  MOD_RES (8)..(8): Thr or Phospho-Thr
  MOD_RES (10)..(10): Modified Cys
  See specification as filed for detailed description of substitutions and preferred embodiments
LVDSVAKTICAGSKP

SEQ ID NO: 757 - protein, 15 aa, Artificial Sequence
  Description of Artificial Sequence: Synthetic peptide
  N-term H or Acetyl
  MOD_RES (6)..(6): Modified Cys
  MOD_RES (8)..(8): Thr or Phospho-Thr
  See specification as filed for detailed description of substitutions and preferred embodiments
LVDSVCKTIDAGSKP

SEQ ID NO: 758 - protein, 15 aa, Artificial Sequence
  Description of Artificial Sequence: Synthetic peptide
  N-term H or Acetyl
  MOD_RES (8)..(8): Ser or Phospho-Ser
  MOD_RES (10)..(10): Modified Cys
  See specification as filed for detailed description of substitutions and preferred embodiments
SQKLLDASKCAKNFV

SEQ ID NO: 759 - protein, 15 aa, Artificial Sequence
  Description of Artificial Sequence: Synthetic peptide
  N-term H or Acetyl
  MOD_RES (8)..(8): Thr or Phospho-Thr
  MOD_RES (10)..(10): Modified Cys
  See specification as filed for detailed description of substitutions and preferred embodiments
YEHQRVYTYCQSRFY

SEQ ID NO: 760 - protein, 15 aa, Artificial Sequence
  Description of Artificial Sequence: Synthetic peptide
  N-term H or Acetyl
  MOD_RES (8)..(8): Ser or Phospho-Ser
  MOD_RES (10)..(10): Modified Cys
  See specification as filed for detailed description of substitutions and preferred embodiments
WHKTTKMSACGTYAW

SEQ ID NO: 761 - protein, 15 aa, Artificial Sequence
  Description of Artificial Sequence: Synthetic peptide
  N-term H or Acetyl
  MOD_RES (6)..(6): Modified Cys
  MOD_RES (8)..(8): Thr or Phospho-Thr
  MOD_RES (11)..(11): Leu or Nle (i.e. isomer of Leucine)
  See specification as filed for detailed description of substitutions and preferred embodiments
LAREWCKTTKLSAAG

SEQ ID NO: 762 - protein, 15 aa, Artificial Sequence
  Description of Artificial Sequence: Synthetic peptide
  N-term H or Acetyl
  MOD_RES (8)..(8): Ser or Phospho-Ser
  MOD_RES (10)..(10): Modified Cys
  See specification as filed for detailed description of substitutions and preferred embodiments
TKQTARKSTCGKAPR

SEQ ID NO: 763 - protein, 15 aa, Artificial Sequence
  Description of Artificial Sequence: Synthetic peptide
  N-term H or Acetyl
  MOD_RES (6)..(6): Modified Cys
  MOD_RES (8)..(8): Thr or Phospho-Thr
  See specification as filed for detailed description of substitutions and preferred embodiments
KQTARCSTGGKAPRK

SEQ ID NO: 764 - protein, 15 aa, Artificial Sequence
  Description of Artificial Sequence: Synthetic peptide
  N-term H or Acetyl
  MOD_RES (8)..(8): Ser or Phospho-Ser
  MOD_RES (10)..(10): Modified Cys
  MOD_RES (13)..(13): Leu or Nle (i.e. isomer of Leucine)
  See specification as filed for detailed description of substitutions and preferred embodiments
KRPQRATSNCFALFD

SEQ ID NO: 765 - protein, 15 aa, Artificial Sequence
  Description of Artificial Sequence: Synthetic peptide
  N-term H or Acetyl
  MOD_RES (8)..(8): Thr or Phospho-Thr
  MOD_RES (10)..(10): Modified Cys
  MOD_RES (14)..(14): Leu or Nle (i.e. isomer of Leucine)
  See specification as filed for detailed description of substitutions and preferred embodiments
KKRPQRATSCVFALF

SEQ ID NO: 766 - protein, 15 aa, Artificial Sequence
  Description of Artificial Sequence: Synthetic peptide
  N-term H or Acetyl
  MOD_RES (8)..(8): Thr or Phospho-Thr
  MOD_RES (10)..(10): Modified Cys
  See specification as filed for detailed description of substitutions and preferred embodiments
TVGNKLDTFCGSPPY

SEQ ID NO: 767 - protein, 15 aa, Artificial Sequence
  Description of Artificial Sequence: Synthetic peptide
  N-term H or Acetyl
  MOD_RES (8)..(8): Thr or Phospho-Thr
  MOD_RES (10)..(10): Modified Cys
  See specification as filed for detailed description of substitutions and preferred embodiments
TFGNKLDTFCGSPPY

SEQ ID NO: 768 - protein, 15 aa, Artificial Sequence
  Description of Artificial Sequence: Synthetic peptide
  N-term H or Acetyl
  MOD_RES (8)..(8): Ser or Phospho-Ser
  MOD_RES (10)..(10): Modified Cys
  See specification as filed for detailed description of substitutions and preferred embodiments
VSTQLVNSICKTYVG

SEQ ID NO: 769 - protein, 15 aa, Artificial Sequence
  Description of Artificial Sequence: Synthetic peptide
  N-term H or Acetyl
  MOD_RES (8)..(8): Thr or Phospho-Thr
  MOD_RES (10)..(10): Modified Cys
  See specification as filed for detailed description of substitutions and preferred embodiments
LVNSIAKTYCGTNAY

SEQ ID NO: 770 - protein, 15 aa, Artificial Sequence
  Description of Artificial Sequence: Synthetic peptide
  N-term H or Acetyl
  MOD_RES (2)..(2): Leu or Nle (i.e. isomer of Leucine)
  MOD_RES (8)..(8): Thr or Phospho-Thr
  MOD_RES (10)..(10): Modified Cys
  See specification as filed for detailed description of substitutions and preferred embodiments
SLDGLFGTICYLPPE

SEQ ID NO: 771 - protein, 15 aa, Artificial Sequence
  Description of Artificial Sequence: Synthetic peptide
  N-term H or Acetyl
  MOD_RES (8)..(8): Ser or Phospho-Ser
  MOD_RES (10)..(10): Modified Cys
  See specification as filed for detailed description of substitutions and preferred embodiments
PDKQFLISPCASPPV

SEQ ID NO: 772 - protein, 15 aa, Artificial Sequence
  Description of Artificial Sequence: Synthetic peptide
  N-term H or Acetyl
  MOD_RES (8)..(8): Ser or Phospho-Ser
  MOD_RES (10)..(10): Modified Cys
  See specification as filed for detailed description of substitutions and preferred embodiments
FLISPPASPCVGWKQ

SEQ ID NO: 773 - protein, 15 aa, Artificial Sequence
  Description of Artificial Sequence: Synthetic peptide
  N-term H or Acetyl
  MOD_RES (8)..(8): Thr or Phospho-Thr
  MOD_RES (9)..(9): Leu or Nle (i.e. isomer of Leucine)
  MOD_RES (10)..(10): Modified Cys
  See specification as filed for detailed description of substitutions and preferred embodiments
LVDSVAKTLCAGSKP

SEQ ID NO: 774 - protein, 15 aa, Artificial Sequence
  Description of Artificial Sequence: Synthetic peptide
  N-term H or Acetyl
  MOD_RES (6)..(6): Modified Cys
  MOD_RES (8)..(8): Thr or Phospho-Thr
  MOD_RES (9)..(9): Leu or Nle (i.e. isomer of Leucine)
  See specification as filed for detailed description of substitutions and preferred embodiments
KLKNNCQTLPGEVNS

SEQ ID NO: 775 - protein, 15 aa, Artificial Sequence
  Description of Artificial Sequence: Synthetic peptide
  N-term H or Acetyl
  MOD_RES (6)..(6): Modified Cys
  MOD_RES (8)..(8): Ser or Phospho-Ser
  See specification as filed for detailed description of substitutions and preferred embodiments
DENFECHSAPPSPEE

SEQ ID NO: 776 - protein, 15 aa, Artificial Sequence
  Description of Artificial Sequence: Synthetic peptide
  N-term H or Acetyl
  MOD_RES (6)..(6): Modified Cys
  MOD_RES (8)..(8): Ser or Phospho-Ser
  See specification as filed for detailed description of substitutions and preferred embodiments
NEYLRCISLPVPVLV

SEQ ID NO: 777 - protein, 15 aa, Artificial Sequence
  Description of Artificial Sequence: Synthetic peptide
  N-term H or Acetyl
  MOD_RES (8)..(8): Thr or Phospho-Thr
  MOD_RES (10)..(10): Modified Cys
  See specification as filed for detailed description of substitutions and preferred embodiments
GDNVLINTYCGVLKI

SEQ ID NO: 778 - protein, 15 aa, Artificial Sequence
  Description of Artificial Sequence: Synthetic peptide
  N-term H or Acetyl
  MOD_RES (8)..(8): Thr or Phospho-Thr
  MOD_RES (10)..(10): Modified Cys
  See specification as filed for detailed description of substitutions and preferred embodiments
GINPSTETFCGTLQY

SEQ ID NO: 779 - protein, 14 aa, Artificial Sequence
  Description of Artificial Sequence: Synthetic peptide
  N-term H or Acetyl
  MOD_RES (7)..(7): Thr or Phospho-Thr
  MOD_RES (9)..(9): Modified Cys
  MOD_RES (11)..(11): Leu or Nle (i.e. isomer of Leucine)
  See specification as filed for detailed description of substitutions and preferred embodiments
TETFTGTLCYLAPE

SEQ ID NO: 780 - protein, 15 aa, Artificial Sequence
  Description of Artificial Sequence: Synthetic peptide
  N-term H or Acetyl
  MOD_RES (8)..(8): Tyr or Phospho-Tyr
  MOD_RES (10)..(10): Modified Cys
  See specification as filed for detailed description of substitutions and preferred embodiments
IPERDSRYSCPLHEE

SEQ ID NO: 781 - protein, 15 aa, Artificial Sequence
  Description of Artificial Sequence: Synthetic peptide
  N-term H or Acetyl
  MOD_RES (8)..(8): Tyr or Phospho-Tyr
  MOD_RES (10)..(10): Modified Cys
  See specification as filed for detailed description of substitutions and preferred embodiments
DNVLINTYSCVLKIS

SEQ ID NO: 782 - protein, 15 aa, Artificial Sequence
  Description of Artificial Sequence: Synthetic peptide
  N-term H or Acetyl
  MOD_RES (8)..(8): Ser or Phospho-Ser
  MOD_RES (10)..(10): Modified Cys
  See specification as filed for detailed description of substitutions and preferred embodiments
GGRRPGTSPCLLQGT

SEQ ID NO: 783 - protein, 15 aa, Artificial Sequence
  Description of Artificial Sequence: Synthetic peptide
  N-term H or Acetyl
  MOD_RES (6)..(6): Modified Cys
  MOD_RES (8)..(8): Ser or Phospho-Ser
  See specification as filed for detailed description of substitutions and preferred embodiments
LVQGICFSQPTSPDH

SEQ ID NO: 784 - protein, 15 aa, Artificial Sequence
  Description of Artificial Sequence: Synthetic peptide
  N-term H or Acetyl
  MOD_RES (6)..(6): Modified Cys
  MOD_RES (8)..(8): Ser or Phospho-Ser
  See specification as filed for detailed description of substitutions and preferred embodiments
EDQPRCQSLDSALLE

SEQ ID NO: 785 - protein, 15 aa, Artificial Sequence
  Description of Artificial Sequence: Synthetic peptide
  N-term H or Acetyl
  MOD_RES (8)..(8): Thr or Phospho-Thr
  MOD_RES (10)..(10): Modified Cys
  MOD_RES (12)..(12): Leu or Nle (i.e. isomer of Leucine)
  See specification as filed for detailed description of substitutions and preferred embodiments
FPKDLRGTECYLSPE

SEQ ID NO: 786 - protein, 15 aa, Artificial Sequence
  Description of Artificial Sequence: Synthetic peptide
  N-term H or Acetyl
  MOD_RES (8)..(8): Ser or Phospho-Ser
  MOD_RES (10)..(10): Modified Cys
  See specification as filed for detailed description of substitutions and preferred embodiments
LELSRRRSLCELHKR

SEQ ID NO: 787 - protein, 15 aa, Artificial Sequence
  Description of Artificial Sequence: Synthetic peptide
  N-term H or Acetyl
  MOD_RES (8)..(8): Thr or Phospho-Thr
  MOD_RES (10)..(10): Modified Cys
  See specification as filed for detailed description of substitutions and preferred embodiments
YDGERKKTLCGTPNY

SEQ ID NO: 788 - protein, 15 aa, Artificial Sequence
  Description of Artificial Sequence: Synthetic peptide
  N-term H or Acetyl
  MOD_RES (8)..(8): Ser or Phospho-Ser
  MOD_RES (10)..(10): Modified Cys
  MOD_RES (12)..(12): Leu or Nle (i.e. isomer of Leucine)
  See specification as filed for detailed description of substitutions and preferred embodiments
RTPGRPLSSCGLDSR

SEQ ID NO: 789 - protein, 15 aa, Artificial Sequence
  Description of Artificial Sequence: Synthetic peptide
  N-term H or Acetyl
  MOD_RES (6)..(6): Modified Cys
  MOD_RES (8)..(8): Tyr or Phospho-Tyr
  MOD_RES (10)..(10): Leu or Nle (i.e. isomer of Leucine)
  See specification as filed for detailed description of substitutions and preferred embodiments
PGRPLCSYGLDSRPP

SEQ ID NO: 790 - protein, 15 aa, Artificial Sequence
  Description of Artificial Sequence: Synthetic peptide
  N-term H or Acetyl
  MOD_RES (4)..(4): Leu or Nle (i.e. isomer of Leucine)
  MOD_RES (8)..(8): Ser or Phospho-Ser
  MOD_RES (10)..(10): Modified Cys
  See specification as filed for detailed description of substitutions and preferred embodiments
DGRLVQLSPCALAAP

SEQ ID NO: 791 - protein, 15 aa, Artificial Sequence
  Description of Artificial Sequence: Synthetic peptide
  N-term H or Acetyl
  MOD_RES (8)..(8): Ser or Phospho-Ser
  MOD_RES (10)..(10): Modified Cys
  See specification as filed for detailed description of substitutions and preferred embodiments
SYTPTPRSPCFIGRR

SEQ ID NO: 792 - protein, 15 aa, Artificial Sequence
  Description of Artificial Sequence: Synthetic peptide
  N-term H or Acetyl
  MOD_RES (8)..(8): Thr or Phospho-Thr
  MOD_RES (10)..(10): Modified Cys
  See specification as filed for detailed description of substitutions and preferred embodiments
HDHTGFLTECVATRW

SEQ ID NO: 793 - protein, 15 aa, Artificial Sequence
  Description of Artificial Sequence: Synthetic peptide
  N-term H or Acetyl
  MOD_RES (6)..(6): Modified Cys
  MOD_RES (8)..(8): Thr or Phospho-Thr
  See specification as filed for detailed description of substitutions and preferred embodiments
HDHTGCLTEYVATRW

SEQ ID NO: 794 - protein, 15 aa, Artificial Sequence
  Description of Artificial Sequence: Synthetic peptide
  N-term H or Acetyl
  MOD_RES (6)..(6): Modified Cys
  MOD_RES (8)..(8): Thr or Phospho-Thr
  MOD_RES (10)..(10): Tyr or Phospho-Tyr
  See specification as filed for detailed description of substitutions and preferred embodiments
HDHTGCLTEYVATRW

SEQ ID NO: 795 - protein, 15 aa, Artificial Sequence
  Description of Artificial Sequence: Synthetic peptide
  N-term H or Acetyl
  MOD_RES (8)..(8): Tyr or Phospho-Tyr
  MOD_RES (10)..(10): Modified Cys
  See specification as filed for detailed description of substitutions and preferred embodiments
HTGFLTEYVCTRWYR

SEQ ID NO: 796 - protein, 15 aa, Artificial Sequence
  Description of Artificial Sequence: Synthetic peptide
  N-term H or Acetyl
  MOD_RES (6)..(6): Thr or Phospho-Thr
  MOD_RES (8)..(8): Tyr or Phospho-Tyr
  MOD_RES (10)..(10): Modified Cys
  See specification as filed for detailed description of substitutions and preferred embodiments
HTGFLTEYVCTRWYR

SEQ ID NO: 797 - protein, 15 aa, Artificial Sequence
  Description of Artificial Sequence: Synthetic peptide
  N-term H or Acetyl
  MOD_RES (8)..(8): Tyr or Phospho-Tyr
  MOD_RES (10)..(10): Modified Cys
  See specification as filed for detailed description of substitutions and preferred embodiments
RGEPNVSYICSRYYR

SEQ ID NO: 798 - protein, 15 aa, Artificial Sequence
  Description of Artificial Sequence: Synthetic peptide
  N-term H or Acetyl
  MOD_RES (8)..(8): Ser or Phospho-Ser
  MOD_RES (10)..(10): Modified Cys
  See specification as filed for detailed description of substitutions and preferred embodiments
TVNQSLLSPCVLEVD

SEQ ID NO: 799 - protein, 15 aa, Artificial Sequence
  Description of Artificial Sequence: Synthetic peptide
  N-term H or Acetyl
  MOD_RES (8)..(8): Thr or Phospho-Thr
  MOD_RES (10)..(10): Modified Cys
  See specification as filed for detailed description of substitutions and preferred embodiments
SPLNITSTPCPDASS

SEQ ID NO: 800 - protein, 15 aa, Artificial Sequence
  Description of Artificial Sequence: Synthetic peptide
  N-term H or Acetyl
  MOD_RES (8)..(8): Tyr or Phospho-Tyr
  MOD_RES (11)..(11): Modified Cys
  See specification as filed for detailed description of substitutions and preferred embodiments
AAFRLFKYGVCLYKN

SEQ ID NO: 801 - protein, 15 aa, Artificial Sequence
  Description of Artificial Sequence: Synthetic peptide
  N-term H or Acetyl
  MOD_RES (6)..(6): Modified Cys
  MOD_RES (8)..(8): Tyr or Phospho-Tyr
  See specification as filed for detailed description of substitutions and preferred embodiments
AAFRLCKYGVQLYKN

SEQ ID NO: 802 - protein, 14 aa, Artificial Sequence
  Description of Artificial Sequence: Synthetic peptide
  N-term H or Acetyl
  MOD_RES (7)..(7): Tyr or Phospho-Tyr
  MOD_RES (9)..(9): Modified Cys
  See specification as filed for detailed description of substitutions and preferred embodiments
SIESDIYACIPDET

SEQ ID NO: 803 - protein, 15 aa, Artificial Sequence
  Description of Artificial Sequence: Synthetic peptide
  N-term H or Acetyl
  MOD_RES (8)..(8): Tyr or Phospho-Tyr
  MOD_RES (9)..(9): Leu or Nle (i.e. isomer of Leucine)
  MOD_RES (10)..(10): Modified Cys
  See specification as filed for detailed description of substitutions and preferred embodiments
DSQQTNDYLCPEEDW

SEQ ID NO: 804 - protein, 15 aa, Artificial Sequence
  Description of Artificial Sequence: Synthetic peptide
  N-term H or Acetyl
  MOD_RES (8)..(8): Tyr or Phospho-Tyr
  MOD_RES (10)..(10): Modified Cys
  See specification as filed for detailed description of substitutions and preferred embodiments
DVYEEDSYVCRSQGR

SEQ ID NO: 805 - protein, 15 aa, Artificial Sequence
  Description of Artificial Sequence: Synthetic peptide
  N-term H or Acetyl
  MOD_RES (5)..(5): Leu or Nle (i.e. isomer of Leucine)
  MOD_RES (8)..(8): Tyr or Phospho-Tyr
  MOD_RES (10)..(10): Modified Cys
  See specification as filed for detailed description of substitutions and preferred embodiments
EELALDVYDCVDRRE

SEQ ID NO: 806 - protein, 15 aa, Artificial Sequence
  Description of Artificial Sequence: Synthetic peptide
  N-term H or Acetyl
  MOD_RES (5)..(5): Leu or Nle (i.e. isomer of Leucine)
  MOD_RES (8)..(8): Tyr or Phospho-Tyr
  MOD_RES (10)..(10): Modified Cys
  See specification as filed for detailed description of substitutions and preferred embodiments
EGGWLEDYDCVHLQG

SEQ ID NO: 807 - protein, 15 aa, Artificial Sequence
  Description of Artificial Sequence: Synthetic peptide
  N-term H or Acetyl
  MOD_RES (8)..(8): Tyr or Phospho-Tyr
  MOD_RES (10)..(10): Modified Cys
  See specification as filed for detailed description of substitutions and preferred embodiments
EIYDRREYSCFEKEQ

SEQ ID NO: 808 - protein, 15 aa, Artificial Sequence
  Description of Artificial Sequence: Synthetic peptide
  N-term H or Acetyl
  MOD_RES (8)..(8): Tyr or Phospho-Tyr
  MOD_RES (10)..(10): Modified Cys
  See specification as filed for detailed description of substitutions and preferred embodiments
ELFDDPSYVCVQNLD

SEQ ID NO: 809 - protein, 15 aa, Artificial Sequence
  Description of Artificial Sequence: Synthetic peptide
  N-term H or Acetyl
  MOD_RES (5)..(5): Leu or Nle (i.e. isomer of Leucine)
  MOD_RES (8)..(8): Tyr or Phospho-Tyr
  MOD_RES (10)..(10): Modified Cys
  See specification as filed for detailed description of substitutions and preferred embodiments
ERSWLDDYDCVHLQG

SEQ ID NO: 810 - protein, 15 aa, Artificial Sequence
  Description of Artificial Sequence: Synthetic peptide
  N-term H or Acetyl
  MOD_RES (6)..(6): Modified Cys
  MOD_RES (8)..(8): Tyr or Phospho-Tyr
  See specification as filed for detailed description of substitutions and preferred embodiments
FGIEDCDYVEPSGFT

SEQ ID NO: 811 - protein, 13 aa, Artificial Sequence
  Description of Artificial Sequence: Synthetic peptide
  N-term H or Acetyl
  MOD_RES (8)..(8): Tyr or Phospho-Tyr
  MOD_RES (10)..(10): Modified Cys
  See specification as filed for detailed description of substitutions and preferred embodiments
FGLGSRAYPCFAA

SEQ ID NO: 812 - protein, 15 aa, Artificial Sequence
  Description of Artificial Sequence: Synthetic peptide
  N-term H or Acetyl
  MOD_RES (8)..(8): Tyr or Phospho-Tyr
  MOD_RES (10)..(10): Modified Cys
  See specification as filed for detailed description of substitutions and preferred embodiments
FLSEETPYSCPTGNH

SEQ ID NO: 813 - protein, 15 aa, Artificial Sequence
  Description of Artificial Sequence: Synthetic peptide
  N-term H or Acetyl
  MOD_RES (6)..(6): Modified Cys
  MOD_RES (8)..(8): Tyr or Phospho-Tyr
  See specification as filed for detailed description of substitutions and preferred embodiments
FLSEECPYSYPTGNH

SEQ ID NO: 814 - protein, 15 aa, Artificial Sequence
  Description of Artificial Sequence: Synthetic peptide
  N-term H or Acetyl
  MOD_RES (8)..(8): Tyr or Phospho-Tyr
  MOD_RES (10)..(10): Modified Cys
  See specification as filed for detailed description of substitutions and preferred embodiments
FRKNFAKYECFKSSP

SEQ ID NO: 815 - protein, 15 aa, Artificial Sequence
  Description of Artificial Sequence: Synthetic peptide
  N-term H or Acetyl
  MOD_RES (3)..(3): Leu or Nle (i.e. isomer of Leucine)
  MOD_RES (8)..(8): Tyr or Phospho-Tyr
  MOD_RES (10)..(10): Modified Cys
  See specification as filed for detailed description of substitutions and preferred embodiments
GWLEDYDYVCLQGKE

SEQ ID NO: 816 - protein, 15 aa, Artificial Sequence
  Description of Artificial Sequence: Synthetic peptide
  N-term H or Acetyl
  MOD_RES (8)..(8): Tyr or Phospho-Tyr
  MOD_RES (10)..(10): Modified Cys
  See specification as filed for detailed description of substitutions and preferred embodiments
IIDEEDTYTCPSTRD

SEQ ID NO: 817 - protein, 15 aa, Artificial Sequence
  Description of Artificial Sequence: Synthetic peptide
  N-term H or Acetyl
  MOD_RES (6)..(6): Modified Cys
  MOD_RES (8)..(8): Tyr or Phospho-Tyr
  MOD_RES (10)..(10): Leu or Nle (i.e. isomer of Leucine)
  See specification as filed for detailed description of substitutions and preferred embodiments
IIDEECTYTLPSTRD

SEQ ID NO: 818 - protein, 14 aa, Artificial Sequence
  Description of Artificial Sequence: Synthetic peptide
  N-term H or Acetyl
  MOD_RES (8)..(8): Tyr or Phospho-Tyr
  MOD_RES (10)..(10): Modified Cys
  See specification as filed for detailed description of substitutions and preferred embodiments
KDNDSHVYACIEDT

SEQ ID NO: 819 - protein, 15 aa, Artificial Sequence
  Description of Artificial Sequence: Synthetic peptide
  N-term H or Acetyl
  MOD_RES (8)..(8): Tyr or Phospho-Tyr
  MOD_RES (10)..(10): Modified Cys
  See specification as filed for detailed description of substitutions and preferred embodiments
LDGEVTPYACTNNNA

SEQ ID NO: 820 - protein, 15 aa, Artificial Sequence
  Description of Artificial Sequence: Synthetic peptide
  N-term H or Acetyl
  MOD_RES (8)..(8): Tyr or Phospho-Tyr
  MOD_RES (10)..(10): Modified Cys
  See specification as filed for detailed description of substitutions and preferred embodiments
LPQDKEYYKCKEPGE

SEQ ID NO: 821 - protein, 15 aa, Artificial Sequence
  Description of Artificial Sequence: Synthetic peptide
  N-term H or Acetyl
  MOD_RES (8)..(8): Tyr or Phospho-Tyr
  MOD_RES (10)..(10): Modified Cys
  MOD_RES (15)..(15): Leu or Nle (i.e. isomer of Leucine)
  See specification as filed for detailed description of substitutions and preferred embodiments
NSTPESDYDCTPNDL

SEQ ID NO: 822 - protein, 15 aa, Artificial Sequence
  Description of Artificial Sequence: Synthetic peptide
  N-term H or Acetyl
  MOD_RES (8)..(8): Tyr or Phospho-Tyr
  MOD_RES (10)..(10): Modified Cys
  See specification as filed for detailed description of substitutions and preferred embodiments
PAPLTPAYHCLPHPS

SEQ ID NO: 823 - protein, 15 aa, Artificial Sequence
  Description of Artificial Sequence: Synthetic peptide
  N-term H or Acetyl
  MOD_RES (8)..(8): Tyr or Phospho-Tyr
  MOD_RES (10)..(10): Modified Cys
  See specification as filed for detailed description of substitutions and preferred embodiments
PSPATDLYQCPPGPG

SEQ ID NO: 824 - protein, 15 aa, Artificial Sequence
  Description of Artificial Sequence: Synthetic peptide
  N-term H or Acetyl
  MOD_RES (8)..(8): Tyr or Phospho-Tyr
  MOD_RES (10)..(10): Modified Cys
  See specification as filed for detailed description of substitutions and preferred embodiments
QDNDQPDYDCVASDE

SEQ ID NO: 825 - protein, 15 aa, Artificial Sequence
  Description of Artificial Sequence: Synthetic peptide
  N-term H or Acetyl
  MOD_RES (10)..(10): Modified Cys
  See specification as filed for detailed description of substitutions and preferred embodiments
QPSSKALYDCEPEND

SEQ ID NO: 826 - protein, 15 aa, Artificial Sequence
  Description of Artificial Sequence: Synthetic peptide
  N-term H or Acetyl
  MOD_RES (8)..(8): Tyr or Phospho-Tyr
  MOD_RES (11)..(11): Modified Cys
  See specification as filed for detailed description of substitutions and preferred embodiments
RDKQRLSYGACTNQI

SEQ ID NO: 827 - protein, 15 aa, Artificial Sequence
  Description of Artificial Sequence: Synthetic peptide
  N-term H or Acetyl
  MOD_RES (6)..(6): Modified Cys
  MOD_RES (8)..(8): Tyr or Phospho-Tyr
  See specification as filed for detailed description of substitutions and preferred embodiments
RDKQRCSYGAFTNQI

SEQ ID NO: 828 - protein, 15 aa, Artificial Sequence
  Description of Artificial Sequence: Synthetic peptide
  N-term H or Acetyl
  MOD_RES (8)..(8): Tyr or Phospho-Tyr
  MOD_RES (10)..(10): Modified Cys
  See specification as filed for detailed description of substitutions and preferred embodiments
RETSKVIYDCIEKTG

SEQ ID NO: 829 - protein, 15 aa, Artificial Sequence
  Description of Artificial Sequence: Synthetic peptide
  N-term H or Acetyl
  MOD_RES (8)..(8): Tyr or Phospho-Tyr
  MOD_RES (10)..(10): Modified Cys
  See specification as filed for detailed description of substitutions and preferred embodiments
RLIEDNEYTCRQGAK

SEQ ID NO: 830 - protein, 15 aa, Artificial Sequence
  Description of Artificial Sequence: Synthetic peptide
  N-term H or Acetyl
  MOD_RES (6)..(6): Modified Cys
  MOD_RES (8)..(8): Tyr or Phospho-Tyr
  See specification as filed for detailed description of substitutions and preferred embodiments
RLIEDCEYTARQGAK

SEQ ID NO: 831 - protein, 15 aa, Artificial Sequence
  Description of Artificial Sequence: Synthetic peptide
  N-term H or Acetyl
  MOD_RES (3)..(3): Leu or Nle (i.e. isomer of Leucine)
  MOD_RES (6)..(6): Modified Cys
  MOD_RES (8)..(8): Tyr or Phospho-Tyr
  See specification as filed for detailed description of substitutions and preferred embodiments
RYLEDCTYYKASKGK

SEQ ID NO: 832 - protein, 15 aa, Artificial Sequence
  Description of Artificial Sequence: Synthetic peptide
  N-term H or Acetyl
  MOD_RES (8)..(8): Tyr or Phospho-Tyr
  MOD_RES (10)..(10): Modified Cys
  See specification as filed for detailed description of substitutions and preferred embodiments
SGDKDHLYSCVAKPR

SEQ ID NO: 833 - protein, 15 aa, Artificial Sequence
  Description of Artificial Sequence: Synthetic peptide
  N-term H or Acetyl
  MOD_RES (8)..(8): Tyr or Phospho-Tyr
  MOD_RES (10)..(10): Modified Cys
  See specification as filed for detailed description of substitutions and preferred embodiments
SIREDDDYDCIIDHG

SEQ ID NO: 834 - protein, 15 aa, Artificial Sequence
  Description of Artificial Sequence: Synthetic peptide
  N-term H or Acetyl
  MOD_RES (8)..(8): Tyr or Phospho-Tyr
  MOD_RES (10)..(10): Modified Cys
  See specification as filed for detailed description of substitutions and preferred embodiments
SVSETDDYACIIDEE

SEQ ID NO: 835 - protein, 15 aa, Artificial Sequence
  Description of Artificial Sequence: Synthetic peptide
  N-term H or Acetyl
  MOD_RES (8)..(8): Tyr or Phospho-Tyr
  MOD_RES (10)..(10): Modified Cys
  See specification as filed for detailed description of substitutions and preferred embodiments
VDPDNEAYECPSEEG

SEQ ID NO: 836 - protein, 15 aa, Artificial Sequence
  Description of Artificial Sequence: Synthetic peptide
  N-term H or Acetyl
  MOD_RES (8)..(8): Tyr or Phospho-Tyr
  MOD_RES (10)..(10): Modified Cys
  See specification as filed for detailed description of substitutions and preferred embodiments
VGEEEHVYSCPNKQK

SEQ ID NO: 837 - protein, 15 aa, Artificial Sequence
  Description of Artificial Sequence: Synthetic peptide
  N-term H or Acetyl
  MOD_RES (6)..(6): Modified Cys
  MOD_RES (8)..(8): Tyr or Phospho-Tyr
  See specification as filed for detailed description of substitutions and preferred embodiments
VGEEECVYSFPNKQK

SEQ ID NO: 838 - protein, 15 aa, Artificial Sequence
  Description of Artificial Sequence: Synthetic peptide
  N-term H or Acetyl
  MOD_RES (6)..(6): Modified Cys
  MOD_RES (8)..(8): Tyr or Phospho-Tyr
  See specification as filed for detailed description of substitutions and preferred embodiments
VLPQDCEYYKVKEPG

SEQ ID NO: 839 - protein, 15 aa, Artificial Sequence
  Description of Artificial Sequence: Synthetic peptide
  N-term H or Acetyl
  MOD_RES (8)..(8): Tyr or Phospho-Tyr
  MOD_RES (10)..(10): Modified Cys
  See specification as filed for detailed description of substitutions and preferred embodiments
YMEDSTYYKCSKGKL

SEQ ID NO: 840 - protein, 15 aa, Artificial Sequence
  Description of Artificial Sequence: Synthetic peptide
  N-term H or Acetyl
  MOD_RES (8)..(8): Tyr or Phospho-Tyr
  MOD_RES (10)..(10): Modified Cys
  See specification as filed for detailed description of substitutions and preferred embodiments
YRLSVEIYDCREYSR

SEQ ID NO: 841 - protein, 14 aa, Artificial Sequence
  Description of Artificial Sequence: Synthetic peptide
  N-term H or Acetyl
  MOD_RES (1)..(1): Leu or Nle (i.e. isomer of Leucine)
  MOD_RES (7)..(7): Tyr or Phospho-Tyr
  MOD_RES (9)..(9): Modified Cys
  See specification as filed for detailed description of substitutions and preferred embodiments
LEAIAKYDCKATAD

SEQ ID NO: 842 - protein, 12 aa, Artificial Sequence
  Description of Artificial Sequence: Synthetic peptide
  N-term H or Acetyl
  MOD_RES (8)..(8): Tyr or Phospho-Tyr
  MOD_RES (10)..(10): Modified Cys
  See specification as filed for detailed description of substitutions and preferred embodiments
AEPLPPSYVCAS

SEQ ID NO: 843 - protein, 12 aa, Artificial Sequence
  Description of Artificial Sequence: Synthetic peptide
  N-term H or Acetyl
  MOD_RES (6)..(6): Modified Cys
  MOD_RES (8)..(8): Tyr or Phospho-Tyr
  See specification as filed for detailed description of substitutions and preferred embodiments
AEPLPCSYVASS

SEQ ID NO: 844 - protein, 15 aa, Artificial Sequence
  Description of Artificial Sequence: Synthetic peptide
  N-term H or Acetyl
  MOD_RES (8)..(8): Tyr or Phospho-Tyr
  MOD_RES (10)..(10): Modified Cys
  See specification as filed for detailed description of substitutions and preferred embodiments
AIETDKEYYCVKDDR

SEQ ID NO: 845 - protein, 14 aa, Artificial Sequence
  Description of Artificial Sequence: Synthetic peptide
  N-term H or Acetyl
  MOD_RES (8)..(8): Tyr or Phospho-Tyr
  MOD_RES (10)..(10): Modified Cys
  See specification as filed for detailed description of substitutions and preferred embodiments
AIYNSISYKCFLPK

SEQ ID NO: 846 - protein, 15 aa, Artificial Sequence
  Description of Artificial Sequence: Synthetic peptide
  N-term H or Acetyl
  MOD_RES (6)..(6): Modified Cys
  MOD_RES (8)..(8): Tyr or Phospho-Tyr
  See specification as filed for detailed description of substitutions and preferred embodiments
AVPEGCEYYRVREDG

SEQ ID NO: 847 - protein, 15 aa, Artificial Sequence
  Description of Artificial Sequence: Synthetic peptide
  N-term H or Acetyl
  MOD_RES (8)..(8): Tyr or Phospho-Tyr
  MOD_RES (10)..(10): Modified Cys
  MOD_RES (11)..(11): Leu or Nle (i.e. isomer of Leucine)
  See specification as filed for detailed description of substitutions and preferred embodiments
DGFIPKNYICLKPHP

SEQ ID NO: 848 - protein, 15 aa, Artificial Sequence
  Description of Artificial Sequence: Synthetic peptide
  N-term H or Acetyl
  MOD_RES (8)..(8): Tyr or Phospho-Tyr
  MOD_RES (10)..(10): Modified Cys
  See specification as filed for detailed description of substitutions and preferred embodiments
DGPKGTGYICTELIS

SEQ ID NO: 849 - protein, 15 aa, Artificial Sequence
  Description of Artificial Sequence: Synthetic peptide
  N-term H or Acetyl
  MOD_RES (5)..(5): Modified Cys
  MOD_RES (8)..(8): Tyr or Phospho-Tyr
  See specification as filed for detailed description of substitutions and preferred embodiments
DGPKCTGYIKTELIS

SEQ ID NO: 850 - protein, 14 aa, Artificial Sequence
  Description of Artificial Sequence: Synthetic peptide
  N-term H or Acetyl
  MOD_RES (6)..(6): Modified Cys
  MOD_RES (8)..(8): Tyr or Phospho-Tyr
  See specification as filed for detailed description of substitutions and preferred embodiments
DPGSACPYLKTKFI

SEQ ID NO: 851 - protein, 15 aa, Artificial Sequence
  Description of Artificial Sequence: Synthetic peptide
  N-term H or Acetyl
  MOD_RES (6)..(6): Modified Cys
  MOD_RES (8)..(8): Tyr or Phospho-Tyr
  See specification as filed for detailed description of substitutions and preferred embodiments
DQTPLCIYNSISYKT

SEQ ID NO: 852 - protein, 15 aa, Artificial Sequence
  Description of Artificial Sequence: Synthetic peptide
  N-term H or Acetyl
  MOD_RES (8)..(8): Tyr or Phospho-Tyr
  MOD_RES (11)..(11): Modified Cys
  See specification as filed for detailed description of substitutions and preferred embodiments
DRLSQGAYGGCSDRP

SEQ ID NO: 853 - protein, 15 aa, Artificial Sequence
  Description of Artificial Sequence: Synthetic peptide
  N-term H or Acetyl
  MOD_RES (6)..(6): Modified Cys
  MOD_RES (8)..(8): Tyr or Phospho-Tyr
  See specification as filed for detailed description of substitutions and preferred embodiments
DRLSQCAYGGLSDRP

SEQ ID NO: 854 - protein, 15 aa, Artificial Sequence
  Description of Artificial Sequence: Synthetic peptide
  N-term H or Acetyl
  MOD_RES (8)..(8): Tyr or Phospho-Tyr
  MOD_RES (10)..(10): Modified Cys
  See specification as filed for detailed description of substitutions and preferred embodiments
EESDQNWYKCELNGK

SEQ ID NO: 855 - protein, 15 aa, Artificial Sequence
  Description of Artificial Sequence: Synthetic peptide
  N-term H or Acetyl
  MOD_RES (8)..(8): Tyr or Phospho-Tyr
  MOD_RES (10)..(10): Modified Cys
  See specification as filed for detailed description of substitutions and preferred embodiments
EESEDPDYYCYNIQG

SEQ ID NO: 856 - protein, 15 aa, Artificial Sequence
  Description of Artificial Sequence: Synthetic peptide
  N-term H or Acetyl
  MOD_RES (8)..(8): Tyr or Phospho-Tyr
  MOD_RES (10)..(10): Modified Cys
  See specification as filed for detailed description of substitutions and preferred embodiments
ESQEELHYACLNFPG

SEQ ID NO: 857 - protein, 15 aa, Artificial Sequence
  Description of Artificial Sequence: Synthetic peptide
  N-term H or Acetyl
  MOD_RES (8)..(8): Tyr or Phospho-Tyr
  MOD_RES (10)..(10): Modified Cys
  See specification as filed for detailed description of substitutions and preferred embodiments
EYLGTKRYICRDLAT

SEQ ID NO: 858 - protein, 15 aa, Artificial Sequence
  Description of Artificial Sequence: Synthetic peptide
  N-term H or Acetyl
  MOD_RES (8)..(8): Tyr or Phospho-Tyr
  MOD_RES (10)..(10): Modified Cys
  See specification as filed for detailed description of substitutions and preferred embodiments
GSNQEEAYVCMSSFY

SEQ ID NO: 859 - protein, 15 aa, Artificial Sequence
  Description of Artificial Sequence: Synthetic peptide
  N-term H or Acetyl
  MOD_RES (5)..(5): Leu or Nle (i.e. isomer of Leucine)
  MOD_RES (6)..(6): Modified Cys
  MOD_RES (8)..(8): Tyr or Phospho-Tyr
  See specification as filed for detailed description of substitutions and preferred embodiments
GSVELCRYDPLQDNT

SEQ ID NO: 860 - protein, 15 aa, Artificial Sequence
  Description of Artificial Sequence: Synthetic peptide
  N-term H or Acetyl
  MOD_RES (6)..(6): Modified Cys
  MOD_RES (8)..(8): Tyr or Phospho-Tyr
  See specification as filed for detailed description of substitutions and preferred embodiments
GVKKPCRYRPGTVAL

SEQ ID NO: 861 - protein, 15 aa, Artificial Sequence
  Description of Artificial Sequence: Synthetic peptide
  N-term H or Acetyl
  MOD_RES (8)..(8): Tyr or Phospho-Tyr
  MOD_RES (10)..(10): Modified Cys
  See specification as filed for detailed description of substitutions and preferred embodiments
HRIDGKIYVCKRVKY

SEQ ID NO: 862 - protein, 15 aa, Artificial Sequence
  Description of Artificial Sequence: Synthetic peptide
  N-term H or Acetyl
  MOD_RES (8)..(8): Tyr or Phospho-Tyr
  MOD_RES (10)..(10): Modified Cys
  See specification as filed for detailed description of substitutions and preferred embodiments
HTGFLTEYVCTRWYR

SEQ ID NO: 863 - protein, 15 aa, Artificial Sequence
  Description of Artificial Sequence: Synthetic peptide
  N-term H or Acetyl
  MOD_RES (8)..(8): Tyr or Phospho-Tyr
  MOD_RES (10)..(10): Modified Cys
  See specification as filed for detailed description of substitutions and preferred embodiments
HWKKYDIYECQTKEE

SEQ ID NO: 864 - protein, 15 aa, Artificial Sequence
  Description of Artificial Sequence: Synthetic peptide
  N-term H or Acetyl
  MOD_RES (8)..(8): Ser or Phospho-Ser
  MOD_RES (10)..(10): Modified Cys
  See specification as filed for detailed description of substitutions and preferred embodiments
IDENSLLSPCAGEDD

SEQ ID NO: 865 - protein, 15 aa, Artificial Sequence
  Description of Artificial Sequence: Synthetic peptide
  N-term H or Acetyl
  MOD_RES (8)..(8): Tyr or Phospho-Tyr
  MOD_RES (10)..(10): Modified Cys
  See specification as filed for detailed description of substitutions and preferred embodiments
IETDKEYYTCKDDRD

SEQ ID NO: 866 - protein, 15 aa, Artificial Sequence
  Description of Artificial Sequence: Synthetic peptide
  N-term H or Acetyl
  MOD_RES (6)..(6): Modified Cys
  MOD_RES (8)..(8): Tyr or Phospho-Tyr
  See specification as filed for detailed description of substitutions and preferred embodiments
ILAIHCSYKPEFHSD

SEQ ID NO: 867 - protein, 15 aa, Artificial Sequence
  Description of Artificial Sequence: Synthetic peptide
  N-term H or Acetyl
  MOD_RES (8)..(8): Tyr or Phospho-Tyr
  MOD_RES (10)..(10): Modified Cys
  See specification as filed for detailed description of substitutions and preferred embodiments
ILLTIDRYLCIVHAV

SEQ ID NO: 868 - protein, 15 aa, Artificial Sequence
  Description of Artificial Sequence: Synthetic peptide
  N-term H or Acetyl
  MOD_RES (8)..(8): Tyr or Phospho-Tyr
  MOD_RES (10)..(10): Modified Cys
  See specification as filed for detailed description of substitutions and preferred embodiments
IPERDSRYSCPLHEE

SEQ ID NO: 869 - protein, 15 aa, Artificial Sequence
  Description of Artificial Sequence: Synthetic peptide
  N-term H or Acetyl
  MOD_RES (8)..(8): Tyr or Phospho-Tyr
  MOD_RES (10)..(10): Modified Cys
  See specification as filed for detailed description of substitutions and preferred embodiments
IRAKIQDYHCLTRKR

SEQ ID NO: 870 - protein, 12 aa, Artificial Sequence
  Description of Artificial Sequence: Synthetic peptide
  N-term H or Acetyl
  MOD_RES (8)..(8): Tyr or Phospho-Tyr
  MOD_RES (10)..(10): Modified Cys
  See specification as filed for detailed description of substitutions and preferred embodiments
IREFLDQYDCPL

SEQ ID NO: 871 - protein, 12 aa, Artificial Sequence
  Description of Artificial Sequence: Synthetic peptide
  N-term H or Acetyl
  MOD_RES (6)..(6): Modified Cys
  MOD_RES (8)..(8): Tyr or Phospho-Tyr
  See specification as filed for detailed description of substitutions and preferred embodiments
IREFLCQYDAPL

SEQ ID NO: 872 - protein, 15 aa, Artificial Sequence
  Description of Artificial Sequence: Synthetic peptide
  N-term H or Acetyl
  MOD_RES (6)..(6): Modified Cys
  MOD_RES (8)..(8): Tyr or Phospho-Tyr
  See specification as filed for detailed description of substitutions and preferred embodiments
KDISYCRYIPETLNK

SEQ ID NO: 873 - protein, 14 aa, Artificial Sequence
  Description of Artificial Sequence: Synthetic peptide
  N-term H or Acetyl
  MOD_RES (8)..(8): Tyr or Phospho-Tyr
  MOD_RES (10)..(10): Modified Cys
  See specification as filed for detailed description of substitutions and preferred embodiments
KFGSLDTYLCKNKN

SEQ ID NO: 874 - protein, 15 aa, Artificial Sequence
  Description of Artificial Sequence: Synthetic peptide
  N-term H or Acetyl
  MOD_RES (8)..(8): Tyr or Phospho-Tyr
  MOD_RES (10)..(10): Modified Cys
  See specification as filed for detailed description of substitutions and preferred embodiments
LAKAVDGYVCPQIKQ

SEQ ID NO: 875 - protein, 15 aa, Artificial Sequence
  Description of Artificial Sequence: Synthetic peptide
  N-term H or Acetyl
  MOD_RES (5)..(5): Modified Cys
  MOD_RES (8)..(8): Tyr or Phospho-Tyr
  See specification as filed for detailed description of substitutions and preferred embodiments
LAKACDGYVKPQIKQ

SEQ ID NO: 876 - protein, 15 aa, Artificial Sequence
  Description of Artificial Sequence: Synthetic peptide
  N-term H or Acetyl
  MOD_RES (8)..(8): Tyr or Phospho-Tyr
  MOD_RES (10)..(10): Modified Cys
  See specification as filed for detailed description of substitutions and preferred embodiments
LILEDDDYVCVFFHQ

SEQ ID NO: 877 - protein, 15 aa, Artificial Sequence
  Description of Artificial Sequence: Synthetic peptide
  N-term H or Acetyl
  MOD_RES (3)..(3): Leu or Nle (i.e. isomer of Leucine)
  MOD_RES (6)..(6): Modified Cys
  MOD_RES (8)..(8): Tyr or Phospho-Tyr
  See specification as filed for detailed description of substitutions and preferred embodiments
LILEYCPYGSLRDYL

SEQ ID NO: 878 - protein, 15 aa, Artificial Sequence
  Description of Artificial Sequence: Synthetic peptide
  N-term H or Acetyl
  MOD_RES (8)..(8): Tyr or Phospho-Tyr
  MOD_RES (10)..(10): Modified Cys
  See specification as filed for detailed description of substitutions and preferred embodiments
LLPLDKDYYCVREPG

SEQ ID NO: 879 - protein, 15 aa, Artificial Sequence
  Description of Artificial Sequence: Synthetic peptide
  N-term H or Acetyl
  MOD_RES (8)..(8): Tyr or Phospho-Tyr
  MOD_RES (10)..(10): Modified Cys
  See specification as filed for detailed description of substitutions and preferred embodiments
LPLDKDYYVCREPGQ

SEQ ID NO: 880 - protein, 15 aa, Artificial Sequence
  Description of Artificial Sequence: Synthetic peptide
  N-term H or Acetyl
  MOD_RES (8)..(8): Tyr or Phospho-Tyr
  MOD_RES (10)..(10): Modified Cys
  See specification as filed for detailed description of substitutions and preferred embodiments
LPQDKEYYKCKEPGE

SEQ ID NO: 881 - protein, 15 aa, Artificial Sequence
  Description of Artificial Sequence: Synthetic peptide
  N-term H or Acetyl
  MOD_RES (1)..(1): Leu or Nle (i.e. isomer of Leucine)
  MOD_RES (8)..(8): Thr or Phospho-Thr
  MOD_RES (10)..(10): Modified Cys
  See specification as filed for detailed description of substitutions and preferred embodiments
LAPPSEETPCIPQRS

SEQ ID NO: 882 - protein, 15 aa, Artificial Sequence
  Description of Artificial Sequence: Synthetic peptide
  N-term H or Acetyl
  MOD_RES (8)..(8): Tyr or Phospho-Tyr
  MOD_RES (10)..(10): Modified Cys
  See specification as filed for detailed description of substitutions and preferred embodiments
NHIGHTGYLCTVTVS

SEQ ID NO: 883 - protein, 15 aa, Artificial Sequence
  Description of Artificial Sequence: Synthetic peptide
  N-term H or Acetyl
  MOD_RES (5)..(5): Modified Cys
  MOD_RES (8)..(8): Tyr or Phospho-Tyr
  See specification as filed for detailed description of substitutions and preferred embodiments
NHIGCTGYLNTVTVS

SEQ ID NO: 884 - protein, 15 aa, Artificial Sequence
  Description of Artificial Sequence: Synthetic peptide
  N-term H or Acetyl
  MOD_RES (6)..(6): Modified Cys
  MOD_RES (8)..(8): Tyr or Phospho-Tyr
  See specification as filed for detailed description of substitutions and preferred embodiments
NLKLICEYLPYGSLR

SEQ ID NO: 885 - protein, 14 aa, Artificial Sequence
  Description of Artificial Sequence: Synthetic peptide
  N-term H or Acetyl
  MOD_RES (8)..(8): Tyr or Phospho-Tyr
  MOD_RES (10)..(10): Modified Cys
  See specification as filed for detailed description of substitutions and preferred embodiments
NLQERRKYLCHRLI

SEQ ID NO: 886 - protein, 14 aa, Artificial Sequence
  Description of Artificial Sequence: Synthetic peptide
  N-term H or Acetyl
  MOD_RES (6)..(6): Modified Cys
  MOD_RES (8)..(8): Tyr or Phospho-Tyr
  See specification as filed for detailed description of substitutions and preferred embodiments
NLQERCKYLKHRLI

SEQ ID NO: 887 - protein, 13 aa, Artificial Sequence
  Description of Artificial Sequence: Synthetic peptide
  N-term H or Acetyl
  MOD_RES (8)..(8): Tyr or Phospho-Tyr
  MOD_RES (10)..(10): Modified Cys
  See specification as filed for detailed description of substitutions and preferred embodiments
NSKPKKSYICTQG

SEQ ID NO: 888 - protein, 15 aa, Artificial Sequence
  Description of Artificial Sequence: Synthetic peptide
  N-term H or Acetyl
  MOD_RES (8)..(8): Tyr or Phospho-Tyr
  MOD_RES (10)..(10): Modified Cys
  See specification as filed for detailed description of substitutions and preferred embodiments
NSLFTPDYECLTEND

SEQ ID NO: 889 - protein, 15 aa, Artificial Sequence
  Description of Artificial Sequence: Synthetic peptide
  N-term H or Acetyl
  MOD_RES (8)..(8): Tyr or Phospho-Tyr
  MOD_RES (10)..(10): Modified Cys
  See specification as filed for detailed description of substitutions and preferred embodiments
NSLISSDYECLSDPT

SEQ ID NO: 890 - protein, 15 aa, Artificial Sequence
  Description of Artificial Sequence: Synthetic peptide
  N-term H or Acetyl
  MOD_RES (8)..(8): Tyr or Phospho-Tyr
  MOD_RES (10)..(10): Modified Cys
  See specification as filed for detailed description of substitutions and preferred embodiments
PEHTKSVYTCSVIEP

SEQ ID NO: 891 - protein, 14 aa, Artificial Sequence
  Description of Artificial Sequence: Synthetic peptide
  N-term H or Acetyl
  MOD_RES (8)..(8): Tyr or Phospho-Tyr
  MOD_RES (10)..(10): Modified Cys
  See specification as filed for detailed description of substitutions and preferred embodiments
PKGTQADYACVKFQ

SEQ ID NO: 892 - protein, 14 aa, Artificial Sequence
  Description of Artificial Sequence: Synthetic peptide
  N-term H or Acetyl
  MOD_RES (6)..(6): Modified Cys
  MOD_RES (8)..(8): Tyr or Phospho-Tyr
  See specification as filed for detailed description of substitutions and preferred embodiments
PKGTQCDYAEVKFQ

SEQ ID NO: 893 - protein, 13 aa, Artificial Sequence
  Description of Artificial Sequence: Synthetic peptide
  N-term H or Acetyl
  MOD_RES (8)..(8): Tyr or Phospho-Tyr
  MOD_RES (10)..(10): Modified Cys
  See specification as filed for detailed description of substitutions and preferred embodiments
PNEPVSDYICANI

SEQ ID NO: 894 - protein, 15 aa, Artificial Sequence
  Description of Artificial Sequence: Synthetic peptide
  N-term H or Acetyl
  MOD_RES (8)..(8): Tyr or Phospho-Tyr
  MOD_RES (10)..(10): Modified Cys
  See specification as filed for detailed description of substitutions and preferred embodiments
PPHLKYLYLCVSDSG

SEQ ID NO: 895 - protein, 15 aa, Artificial Sequence
  Description of Artificial Sequence: Synthetic peptide
  N-term H or Acetyl
  MOD_RES (8)..(8): Tyr or Phospho-Tyr
  MOD_RES (10)..(10): Modified Cys
  See specification as filed for detailed description of substitutions and preferred embodiments
PSSSIDEYFCEQPLK

SEQ ID NO: 896 - protein, 15 aa, Artificial Sequence
  Description of Artificial Sequence: Synthetic peptide
  N-term H or Acetyl
  MOD_RES (8)..(8): Tyr or Phospho-Tyr
  MOD_RES (10)..(10): Modified Cys
  See specification as filed for detailed description of substitutions and preferred embodiments
PTPPHLKYLCLVVSD

SEQ ID NO: 897 - protein, 15 aa, Artificial Sequence
  Description of Artificial Sequence: Synthetic peptide
  N-term H or Acetyl
  MOD_RES (8)..(8): Tyr or Phospho-Tyr
  MOD_RES (10)..(10): Modified Cys
  See specification as filed for detailed description of substitutions and preferred embodiments
PYGSLRDYLCKHKER

SEQ ID NO: 898 - protein, 15 aa, Artificial Sequence
  Description of Artificial Sequence: Synthetic peptide
  N-term H or Acetyl
  MOD_RES (8)..(8): Tyr or Phospho-Tyr
  MOD_RES (10)..(10): Modified Cys
  See specification as filed for detailed description of substitutions and preferred embodiments
QHDNIVKYKCVAYSA

SEQ ID NO: 899 - protein, 15 aa, Artificial Sequence
  Description of Artificial Sequence: Synthetic peptide
  N-term H or Acetyl
  MOD_RES (6)..(6): Leu or Nle (i.e. isomer of Leucine)
  MOD_RES (8)..(8): Tyr or Phospho-Tyr
  MOD_RES (10)..(10): Modified Cys
  See specification as filed for detailed description of substitutions and preferred embodiments
QISKGLEYLCSRRSV

SEQ ID NO: 900 - protein, 15 aa, Artificial Sequence
  Description of Artificial Sequence: Synthetic peptide
  N-term H or Acetyl
  MOD_RES (6)..(6): Modified Cys
  MOD_RES (8)..(8): Tyr or Phospho-Tyr
  See specification as filed for detailed description of substitutions and preferred embodiments
QISKGCEYLGTKRYI

SEQ ID NO: 901 - protein, 15 aa, Artificial Sequence
  Description of Artificial Sequence: Synthetic peptide
  N-term H or Acetyl
  MOD_RES (8)..(8): Tyr or Phospho-Tyr
  MOD_RES (10)..(10): Modified Cys
  See specification as filed for detailed description of substitutions and preferred embodiments
RHSTILDYICVVPTA

SEQ ID NO: 902 - protein, 15 aa, Artificial Sequence
  Description of Artificial Sequence: Synthetic peptide
  N-term H or Acetyl
  MOD_RES (8)..(8): Tyr or Phospho-Tyr
  MOD_RES (10)..(10): Modified Cys
  See specification as filed for detailed description of substitutions and preferred embodiments
SFLSRSLYFCPLLHY

SEQ ID NO: 903 - protein, 15 aa, Artificial Sequence
  Description of Artificial Sequence: Synthetic peptide
  N-term H or Acetyl
  MOD_RES (6)..(6): Modified Cys
  MOD_RES (8)..(8): Tyr or Phospho-Tyr
  See specification as filed for detailed description of substitutions and preferred embodiments
SGGERCDYVAPSGSY

SEQ ID NO: 904 - protein, 15 aa, Artificial Sequence
  Description of Artificial Sequence: Synthetic peptide
  N-term H or Acetyl
  MOD_RES (6)..(6): Modified Cys
  MOD_RES (8)..(8): Tyr or Phospho-Tyr
  See specification as filed for detailed description of substitutions and preferred embodiments
SLRLVCEYLPSGSLR

SEQ ID NO: 905 - protein, 15 aa, Artificial Sequence
  Description of Artificial Sequence: Synthetic peptide
  N-term H or Acetyl
  MOD_RES (8)..(8): Tyr or Phospho-Tyr
  MOD_RES (10)..(10): Modified Cys
  MOD_RES (11)..(11): Leu or Nle (i.e. isomer of Leucine)
  See specification as filed for detailed description of substitutions and preferred embodiments
SPLTTGVYVCLPPTE

SEQ ID NO: 906 - protein, 15 aa, Artificial Sequence
  Description of Artificial Sequence: Synthetic peptide
  N-term H or Acetyl
  MOD_RES (8)..(8): Tyr or Phospho-Tyr
  MOD_RES (10)..(10): Modified Cys
  See specification as filed for detailed description of substitutions and preferred embodiments
TAKAVDGYVCPQIKQ

SEQ ID NO: 907 - protein, 15 aa, Artificial Sequence
  Description of Artificial Sequence: Synthetic peptide
  N-term H or Acetyl
  MOD_RES (6)..(6): Modified Cys
  MOD_RES (8)..(8): Tyr or Phospho-Tyr
  See specification as filed for detailed description of substitutions and preferred embodiments
TEQDLCLYSDFPNII

SEQ ID NO: 908 - protein, 15 aa, Artificial Sequence
  Description of Artificial Sequence: Synthetic peptide
  N-term H or Acetyl
  MOD_RES (8)..(8): Tyr or Phospho-Tyr
  MOD_RES (10)..(10): Modified Cys
  See specification as filed for detailed description of substitutions and preferred embodiments
TGMFPRNYVCPVNRN

SEQ ID NO: 909 - protein, 15 aa, Artificial Sequence
  Description of Artificial Sequence: Synthetic peptide
  N-term H or Acetyl
  MOD_RES (6)..(6): Modified Cys
  MOD_RES (8)..(8): Tyr or Phospho-Tyr
  MOD_RES (15)..(15): Leu or Nle (i.e. isomer of Leucine)
  See specification as filed for detailed description of substitutions and preferred embodiments
TPENNCEYAKVSGVL

SEQ ID NO: 910 - protein, 15 aa, Artificial Sequence
  Description of Artificial Sequence: Synthetic peptide
  N-term H or Acetyl
  MOD_RES (8)..(8): Tyr or Phospho-Tyr
  MOD_RES (10)..(10): Modified Cys
  See specification as filed for detailed description of substitutions and preferred embodiments
TSDEKVDYVCVDKEK

SEQ ID NO: 911 - protein, 15 aa, Artificial Sequence
  Description of Artificial Sequence: Synthetic peptide
  N-term H or Acetyl
  MOD_RES (8)..(8): Tyr or Phospho-Tyr
  MOD_RES (10)..(10): Modified Cys
  See specification as filed for detailed description of substitutions and preferred embodiments
VAKFIDDYVCVQIKQ

SEQ ID NO: 912 - protein, 15 aa, Artificial Sequence
  Description of Artificial Sequence: Synthetic peptide
  N-term H or Acetyl
  MOD_RES (8)..(8): Tyr or Phospho-Tyr
  MOD_RES (10)..(10): Modified Cys
  See specification as filed for detailed description of substitutions and preferred embodiments
VFLRSINYVCFPSLK

SEQ ID NO: 913 - protein, 15 aa, Artificial Sequence
  Description of Artificial Sequence: Synthetic peptide
  N-term H or Acetyl
  MOD_RES (8)..(8): Tyr or Phospho-Tyr
  MOD_RES (10)..(10): Modified Cys
  See specification as filed for detailed description of substitutions and preferred embodiments
VHPLSAPYPCLDTPE

SEQ ID NO: 914 - protein, 15 aa, Artificial Sequence
  Description of Artificial Sequence: Synthetic peptide
  N-term H or Acetyl
  MOD_RES (6)..(6): Modified Cys
  MOD_RES (8)..(8): Tyr or Phospho-Tyr
  See specification as filed for detailed description of substitutions and preferred embodiments
VHPLSCPYPPLDTPE

SEQ ID NO: 915 - protein, 15 aa, Artificial Sequence
  Description of Artificial Sequence: Synthetic peptide
  N-term H or Acetyl
  MOD_RES (8)..(8): Tyr or Phospho-Tyr
  MOD_RES (10)..(10): Modified Cys
  See specification as filed for detailed description of substitutions and preferred embodiments
VKYKGVAYSCGRRNL

SEQ ID NO: 916 - protein, 15 aa, Artificial Sequence
  Description of Artificial Sequence: Synthetic peptide
  N-term H or Acetyl
  MOD_RES (8)..(8): Tyr or Phospho-Tyr
  MOD_RES (10)..(10): Modified Cys
  MOD_RES (11)..(11): Leu or Nle (i.e. isomer of Leucine)
  See specification as filed for detailed description of substitutions and preferred embodiments
VLNQEEAYVCLASFY

SEQ ID NO: 917 - protein, 15 aa, Artificial Sequence
  Description of Artificial Sequence: Synthetic peptide
  N-term H or Acetyl
  MOD_RES (6)..(6): Modified Cys
  MOD_RES (8)..(8): Tyr or Phospho-Tyr
  See specification as filed for detailed description of substitutions and preferred embodiments
VLPQDCEYYKVKEPG

SEQ ID NO: 918 - protein, 15 aa, Artificial Sequence
  Description of Artificial Sequence: Synthetic peptide
  N-term H or Acetyl
  MOD_RES (8)..(8): Tyr or Phospho-Tyr
  MOD_RES (10)..(10): Modified Cys
  See specification as filed for detailed description of substitutions and preferred embodiments
VLYRIRFYFCRWYSS

SEQ ID NO: 919 - protein, 15 aa, Artificial Sequence
  Description of Artificial Sequence: Synthetic peptide
  N-term H or Acetyl
  MOD_RES (8)..(8): Tyr or Phospho-Tyr
  MOD_RES (10)..(10): Modified Cys
  See specification as filed for detailed description of substitutions and preferred embodiments
VNGHLDSYECVTQLP

SEQ ID NO: 920 - protein, 15 aa, Artificial Sequence
  Description of Artificial Sequence: Synthetic peptide
  N-term H or Acetyl
  MOD_RES (8)..(8): Tyr or Phospho-Tyr
  MOD_RES (10)..(10): Modified Cys
  See specification as filed for detailed description of substitutions and preferred embodiments
VPEGHEYYRCREDGD

SEQ ID NO: 921 - protein, 15 aa, Artificial Sequence
  Description of Artificial Sequence: Synthetic peptide
  N-term H or Acetyl
  MOD_RES (8)..(8): Tyr or Phospho-Tyr
  MOD_RES (11)..(11): Modified Cys
  See specification as filed for detailed description of substitutions and preferred embodiments
VRREVGDYGQCHETE

SEQ ID NO: 922 - protein, 15 aa, Artificial Sequence
  Description of Artificial Sequence: Synthetic peptide
  N-term H or Acetyl
  MOD_RES (2)..(2): Leu or Nle (i.e. isomer of Leucine)
  MOD_RES (4)..(4): Modified Cys
  MOD_RES (6)..(6): Tyr or Phospho-Tyr
  MOD_RES (10)..(10): Leu or Nle (i.e. isomer of Leucine)
  See specification as filed for detailed description of substitutions and preferred embodiments
GLECIYFEFLGGKKK

SEQ ID NO: 923 - protein, 15 aa, Artificial Sequence
  Description of Artificial Sequence: Synthetic peptide
  N-term H or Acetyl
  MOD_RES (2)..(2): Leu or Nle (i.e. isomer of Leucine)
  MOD_RES (6)..(6): Tyr or Phospho-Tyr
  MOD_RES (8)..(8): Modified Cys
  MOD_RES (10)..(10): Leu or Nle (i.e. isomer of Leucine)
  See specification as filed for detailed description of substitutions and preferred embodiments
GLEDIYFCFLGGKKK

SEQ ID NO: 924 - protein, 12 aa, Artificial Sequence
  Description of Artificial Sequence: Synthetic peptide
  N-term H or Acetyl
  MOD_RES (4)..(4): Tyr or Phospho-Tyr
  MOD_RES (6)..(6): Modified Cys
  See specification as filed for detailed description of substitutions and preferred embodiments
EAIYACPFAKKK

SEQ ID NO: 925 - protein, 12 aa, Artificial Sequence
  Description of Artificial Sequence: Synthetic peptide
  N-term H or Acetyl
  MOD_RES (2)..(2): Modified Cys
  MOD_RES (4)..(4): Tyr or Phospho-Tyr
  See specification as filed for detailed description of substitutions and preferred embodiments
ECIYAAPFAKKK

SEQ ID NO: 926 - protein, 13 aa, Artificial Sequence
  Description of Artificial Sequence: Synthetic peptide
  N-term H or Acetyl
  MOD_RES (8)..(8): Tyr or Phospho-Tyr
  MOD_RES (10)..(10): Modified Cys
  See specification as filed for detailed description of substitutions and preferred embodiments
RRAEEEEYICLVA

SEQ ID NO: 927 - protein, 12 aa, Artificial Sequence
  Description of Artificial Sequence: Synthetic peptide
  N-term H or Acetyl
  MOD_RES (7)..(7): Tyr or Phospho-Tyr
  MOD_RES (9)..(9): Modified Cys
  See specification as filed for detailed description of substitutions and preferred embodiments
RAEEEEYICLVA

SEQ ID NO: 928 - protein, 12 aa, Artificial Sequence
  Description of Artificial Sequence: Synthetic peptide
  N-term H or Acetyl
  MOD_RES (9)..(9): Tyr or Phospho-Tyr
  MOD_RES (11)..(11): Modified Cys
  See specification as filed for detailed description of substitutions and preferred embodiments
KKKAEEEEYICL

SEQ ID NO: 929 - protein, 11 aa, Artificial Sequence
  Description of Artificial Sequence: Synthetic peptide
  N-term H or Acetyl
  MOD_RES (9)..(9): Tyr or Phospho-Tyr
  MOD_RES (11)..(11): Modified Cys
  See specification as filed for detailed description of substitutions and preferred embodiments
KKKAEEEEYIC

SEQ ID NO: 930 - protein, 16 aa, Artificial Sequence
  Description of Artificial Sequence: Synthetic peptide
  N-term H or Acetyl
  MOD_RES (4)..(4): Modified Cys
  MOD_RES (6)..(6): Tyr or Phospho-Tyr
  See specification as filed for detailed description of substitutions and preferred embodiments
VYSCDYYRLFNPSKKK

SEQ ID NO: 931 - protein, 16 aa, Artificial Sequence
  Description of Artificial Sequence: Synthetic peptide
  N-term H or Acetyl
  MOD_RES (4)..(4): Modified Cys
  MOD_RES (6)..(6): Tyr or Phospho-Tyr
  MOD_RES (7)..(7): Tyr or Phospho-Tyr
  See specification as filed for detailed description of substitutions and preferred embodiments
VYSCDYYRLFNPSKKK

SEQ ID NO: 932 - protein, 18 aa, Artificial Sequence
  Description of Artificial Sequence: Synthetic peptide
  N-term H or Acetyl
  MOD_RES (6)..(6): Modified Cys
  MOD_RES (8)..(8): Tyr or Phospho-Tyr
  MOD_RES (9)..(9): Tyr or Phospho-Tyr
  MOD_RES (10)..(10): Tyr or Phospho-Tyr
  See specification as filed for detailed description of substitutions and preferred embodiments
GAGEECDYYYIWAGKKKK

SEQ ID NO: 933 - protein, 12 aa, Artificial Sequence
  Description of Artificial Sequence: Synthetic peptide
  N-term H or Acetyl
  MOD_RES (6)..(6): Modified Cys
  See specification as filed for detailed description of substitutions and preferred embodiments
KKKKECIYFFFG

SEQ ID NO: 934 - protein, 15 aa, Artificial Sequence
  Description of Artificial Sequence: Synthetic peptide
  N-term H or Acetyl
  MOD_RES (10)..(10): Tyr or Phospho-Tyr
  MOD_RES (12)..(12): Modified Cys
  See specification as filed for detailed description of substitutions and preferred embodiments
KKKRAHEEIYFCFWG

SEQ ID NO: 935 - protein, 13 aa, Artificial Sequence
  Description of Artificial Sequence: Synthetic peptide
  N-term H or Acetyl
  MOD_RES (8)..(8): Tyr or Phospho-Tyr
  MOD_RES (10)..(10): Modified Cys
  See specification as filed for detailed description of substitutions and preferred embodiments
KKKEEEIYFCFWG

SEQ ID NO: 936 - protein, 14 aa, Artificial Sequence
  Description of Artificial Sequence: Synthetic peptide
  N-term H or Acetyl
  MOD_RES (9)..(9): Tyr or Phospho-Tyr
  MOD_RES (11)..(11): Modified Cys
  See specification as filed for detailed description of substitutions and preferred embodiments
KKKKEEEIYFCFWG

SEQ ID NO: 937 - protein, 15 aa, Artificial Sequence
  Description of Artificial Sequence: Synthetic peptide
  N-term H or Acetyl
  MOD_RES (6)..(6): Modified Cys
  MOD_RES (8)..(8): Tyr or Phospho-Tyr
  See specification as filed for detailed description of substitutions and preferred embodiments
FTDRLCQYISTRGLG

SEQ ID NO: 938 - protein, 15 aa, Artificial Sequence
  Description of Artificial Sequence: Synthetic peptide
  N-term H or Acetyl
  MOD_RES (8)..(8): Tyr or Phospho-Tyr
  MOD_RES (10)..(10): Modified Cys
  See specification as filed for detailed description of substitutions and preferred embodiments
FTDRLQQYICTRGLG

SEQ ID NO: 939 - protein, 13 aa, Artificial Sequence
  Description of Artificial Sequence: Synthetic peptide
  N-term H or Acetyl
  MOD_RES (2)..(2): Modified Cys
  MOD_RES (4)..(4): Tyr or Phospho-Tyr
  See specification as filed for detailed description of substitutions and preferred embodiments
GCNYRGYSLGNWV

SEQ ID NO: 940 - protein, 10 aa, Artificial Sequence
  Description of Artificial Sequence: Synthetic peptide
  N-term H or Acetyl
  MOD_RES (5)..(5): Tyr or Phospho-Tyr
  MOD_RES (7)..(7): Modified Cys
  See specification as filed for detailed description of substitutions and preferred embodiments
EEEIYFCFWG

SEQ ID NO: 941 - protein, 12 aa, Artificial Sequence
  Description of Artificial Sequence: Synthetic peptide
  N-term H or Acetyl
  MOD_RES (7)..(7): Tyr or Phospho-Tyr
  MOD_RES (9)..(9): Modified Cys
  See specification as filed for detailed description of substitutions and preferred embodiments
KKEEEIYFCFWG

SEQ ID NO: 942 - protein, 12 aa, Artificial Sequence
  Description of Artificial Sequence: Synthetic peptide
  N-term H or Acetyl
  MOD_RES (7)..(7): Tyr or Phospho-Tyr
  MOD_RES (9)..(9): Modified Cys
  See specification as filed for detailed description of substitutions and preferred embodiments
RAHEEIYFCFWG

SEQ ID NO: 943 - protein, 15 aa, Artificial Sequence
  Description of Artificial Sequence: Synthetic peptide
  N-term H or Acetyl
  MOD_RES (8)..(8): Tyr or Phospho-Tyr
  MOD_RES (10)..(10): Modified Cys
  See specification as filed for detailed description of substitutions and preferred embodiments
IENEEQEYVCTVKSS

SEQ ID NO: 944 - protein, 15 aa, Artificial Sequence
  Description of Artificial Sequence: Synthetic peptide
  N-term H or Acetyl
  MOD_RES (8)..(8): Tyr or Phospho-Tyr
  MOD_RES (10)..(10): Modified Cys
  See specification as filed for detailed description of substitutions and preferred embodiments
AVLADVSYLCAMEKS

SEQ ID NO: 945 - protein, 15 aa, Artificial Sequence
  Description of Artificial Sequence: Synthetic peptide
  N-term H or Acetyl
  MOD_RES (8)..(8): Tyr or Phospho-Tyr
  MOD_RES (10)..(10): Modified Cys
  See specification as filed for detailed description of substitutions and preferred embodiments
ARPLVEFYECIKKYE

SEQ ID NO: 946 - protein, 15 aa, Artificial Sequence
  Description of Artificial Sequence: Synthetic peptide
  N-term H or Acetyl
  MOD_RES (8)..(8): Tyr or Phospho-Tyr
  MOD_RES (10)..(10): Modified Cys
  See specification as filed for detailed description of substitutions and preferred embodiments
FYEEIKKYECLETEE

SEQ ID NO: 947 - protein, 15 aa, Artificial Sequence
  Description of Artificial Sequence: Synthetic peptide
  N-term H or Acetyl
  MOD_RES (8)..(8): Tyr or Phospho-Tyr
  MOD_RES (10)..(10): Modified Cys
  See specification as filed for detailed description of substitutions and preferred embodiments
DGDGQVNYECFVQMM

SEQ ID NO: 948 - protein, 15 aa, Artificial Sequence
  Description of Artificial Sequence: Synthetic peptide
  N-term H or Acetyl
  MOD_RES (8)..(8): Tyr or Phospho-Tyr
  MOD_RES (10)..(10): Modified Cys
  See specification as filed for detailed description of substitutions and preferred embodiments
FDKDGNGYICAAELR

SEQ ID NO: 949 - protein, 15 aa, Artificial Sequence
  Description of Artificial Sequence: Synthetic peptide
  N-term H or Acetyl
  MOD_RES (8)..(8): Tyr or Phospho-Tyr
  MOD_RES (10)..(10): Modified Cys
  See specification as filed for detailed description of substitutions and preferred embodiments
TQEQYELYSCMGSTF

SEQ ID NO: 950 - protein, 15 aa, Artificial Sequence
  Description of Artificial Sequence: Synthetic peptide
  N-term H or Acetyl
  MOD_RES (8)..(8): Tyr or Phospho-Tyr
  MOD_RES (10)..(10): Modified Cys
  See specification as filed for detailed description of substitutions and preferred embodiments
MAEEKKAYKCAKERE

SEQ ID NO: 951 - protein, 15 aa, Artificial Sequence
  Description of Artificial Sequence: Synthetic peptide
  N-term H or Acetyl
  MOD_RES (8)..(8): Tyr or Phospho-Tyr
  MOD_RES (10)..(10): Modified Cys
  See specification as filed for detailed description of substitutions and preferred embodiments
TDGEDADYTCFTNQQ

SEQ ID NO: 952 - protein, 11 aa, Artificial Sequence
  Description of Artificial Sequence: Synthetic peptide
  N-term H or Acetyl
  MOD_RES (8)..(8): Tyr or Phospho-Tyr
  MOD_RES (10)..(10): Modified Cys
  See specification as filed for detailed description of substitutions and preferred embodiments
SSHKGFHYKCG

SEQ ID NO: 953 - protein, 10 aa, Artificial Sequence
  Description of Artificial Sequence: Synthetic peptide
  N-term H or Acetyl
  MOD_RES (6)..(6): Modified Cys
  MOD_RES (8)..(8): Tyr or Phospho-Tyr
  See specification as filed for detailed description of substitutions and preferred embodiments
SSHKGCHYKH

SEQ ID NO: 954 - protein, 15 aa, Artificial Sequence
  Description of Artificial Sequence: Synthetic peptide
  N-term H or Acetyl
  MOD_RES (8)..(8): Tyr or Phospho-Tyr
  MOD_RES (10)..(10): Modified Cys
  See specification as filed for detailed description of substitutions and preferred embodiments
GGPEPGPYACPSVNT

SEQ ID NO: 955 - protein, 15 aa, Artificial Sequence
  Description of Artificial Sequence: Synthetic peptide
  N-term H or Acetyl
  MOD_RES (8)..(8): Tyr or Phospho-Tyr
  MOD_RES (10)..(10): Modified Cys
  See specification as filed for detailed description of substitutions and preferred embodiments
RNEGVATYACAVLFR

SEQ ID NO: 956 - protein, 15 aa, Artificial Sequence
  Description of Artificial Sequence: Synthetic peptide
  N-term H or Acetyl
  MOD_RES (8)..(8): Tyr or Phospho-Tyr
  MOD_RES (10)..(10): Modified Cys
  See specification as filed for detailed description of substitutions and preferred embodiments
DVVDADEYLCPQQGF

SEQ ID NO: 957 - protein, 11 aa, Artificial Sequence
  Description of Artificial Sequence: Synthetic peptide
  N-term H or Acetyl
  MOD_RES (5)..(5): Tyr or Phospho-Tyr
  MOD_RES (7)..(7): Modified Cys
  See specification as filed for detailed description of substitutions and preferred embodiments
DADEYLCPQQG

SEQ ID NO: 958 - protein, 15 aa, Artificial Sequence
  Description of Artificial Sequence: Synthetic peptide
  N-term H or Acetyl
  MOD_RES (8)..(8): Tyr or Phospho-Tyr
  MOD_RES (10)..(10): Modified Cys
  See specification as filed for detailed description of substitutions and preferred embodiments
EDSFLQRYSCDPTGA

SEQ ID NO: 959 - protein, 10 aa, Artificial Sequence
  Description of Artificial Sequence: Synthetic peptide
  N-term H or Acetyl
  MOD_RES (5)..(5): Tyr or Phospho-Tyr
  MOD_RES (7)..(7): Modified Cys
  See specification as filed for detailed description of substitutions and preferred embodiments
PVPEYICQSV

SEQ ID NO: 960 - protein, 10 aa, Artificial Sequence
  Description of Artificial Sequence: Synthetic peptide
  N-term H or Acetyl
  MOD_RES (5)..(5): Tyr or Phospho-Tyr
  MOD_RES (7)..(7): Modified Cys
  See specification as filed for detailed description of substitutions and preferred embodiments
PVPEYICQSV

SEQ ID NO: 961 - protein, 15 aa, Artificial Sequence
  Description of Artificial Sequence: Synthetic peptide
  N-term H or Acetyl
  MOD_RES (8)..(8): Tyr or Phospho-Tyr
  MOD_RES (10)..(10): Modified Cys
  See specification as filed for detailed description of substitutions and preferred embodiments
TFLPVPEYICQSVPK

SEQ ID NO: 962 - protein, 15 aa, Artificial Sequence
  Description of Artificial Sequence: Synthetic peptide
  N-term H or Acetyl
  MOD_RES (6)..(6): Modified Cys
  MOD_RES (8)..(8): Tyr or Phospho-Tyr
  See specification as filed for detailed description of substitutions and preferred embodiments
TFLPVCEYINQSVPK

SEQ ID NO: 963 - protein, 15 aa, Artificial Sequence
  Description of Artificial Sequence: Synthetic peptide
  N-term H or Acetyl
  MOD_RES (8)..(8): Tyr or Phospho-Tyr
  MOD_RES (10)..(10): Modified Cys
  See specification as filed for detailed description of substitutions and preferred embodiments
ISLDNPDYQCDFFPK

SEQ ID NO: 964 - protein, 10 aa, Artificial Sequence
  Description of Artificial Sequence: Synthetic peptide
  N-term H or Acetyl
  MOD_RES (6)..(6): Tyr or Phospho-Tyr
  MOD_RES (8)..(8): Modified Cys
  See specification as filed for detailed description of substitutions and preferred embodiments
AENAEYLCVA

SEQ ID NO: 965 - protein, 10 aa, Artificial Sequence
  Description of Artificial Sequence: Synthetic peptide
  N-term H or Acetyl
  MOD_RES (6)..(6): Tyr or Phospho-Tyr
  MOD_RES (8)..(8): Modified Cys
  See specification as filed for detailed description of substitutions and preferred embodiments
AENAEYLCVA

SEQ ID NO: 966 - protein, 15 aa, Artificial Sequence
  Description of Artificial Sequence: Synthetic peptide
  N-term H or Acetyl
  MOD_RES (8)..(8): Tyr or Phospho-Tyr
  MOD_RES (10)..(10): Modified Cys
  See specification as filed for detailed description of substitutions and preferred embodiments
STAENAEYLCVAPQS

SEQ ID NO: 967 - protein, 15 aa, Artificial Sequence
  Description of Artificial Sequence: Synthetic peptide
  N-term H or Acetyl
  MOD_RES (6)..(6): Modified Cys
  MOD_RES (8)..(8): Tyr or Phospho-Tyr
  See specification as filed for detailed description of substitutions and preferred embodiments
STAENCEYLRVAPQS

SEQ ID NO: 968 - protein, 15 aa, Artificial Sequence
  Description of Artificial Sequence: Synthetic peptide
  N-term H or Acetyl
  MOD_RES (6)..(6): Modified Cys
  MOD_RES (8)..(8): Tyr or Phospho-Tyr
  See specification as filed for detailed description of substitutions and preferred embodiments
RLDGECIYIRHSNLM

SEQ ID NO: 969 - protein, 15 aa, Artificial Sequence
  Description of Artificial Sequence: Synthetic peptide
  N-term H or Acetyl
  MOD_RES (8)..(8): Tyr or Phospho-Tyr
  MOD_RES (10)..(10): Modified Cys
  See specification as filed for detailed description of substitutions and preferred embodiments
NFANFSAYPCEEDMI

SEQ ID NO: 970 - protein, 15 aa, Artificial Sequence
  Description of Artificial Sequence: Synthetic peptide
  N-term H or Acetyl
  MOD_RES (8)..(8): Tyr or Phospho-Tyr
  MOD_RES (10)..(10): Modified Cys
  See specification as filed for detailed description of substitutions and preferred embodiments
KEVHKSGYLCSERLI

SEQ ID NO: 971 - protein, 15 aa, Artificial Sequence
  Description of Artificial Sequence: Synthetic peptide
  N-term H or Acetyl
  MOD_RES (8)..(8): Tyr or Phospho-Tyr
  MOD_RES (10)..(10): Modified Cys
  See specification as filed for detailed description of substitutions and preferred embodiments
LMLRLQDYECKTKKA

SEQ ID NO: 972 - protein, 15 aa, Artificial Sequence
  Description of Artificial Sequence: Synthetic peptide
  N-term H or Acetyl
  MOD_RES (8)..(8): Tyr or Phospho-Tyr
  MOD_RES (10)..(10): Modified Cys
  See specification as filed for detailed description of substitutions and preferred embodiments
TEADGELYVCNTPSG

SEQ ID NO: 973 - protein, 15 aa, Artificial Sequence
  Description of Artificial Sequence: Synthetic peptide
  N-term H or Acetyl
  MOD_RES (8)..(8): Tyr or Phospho-Tyr
  MOD_RES (10)..(10): Modified Cys
  See specification as filed for detailed description of substitutions and preferred embodiments
MRHVSISYDCPPTPG

SEQ ID NO: 974 - protein, 15 aa, Artificial Sequence
  Description of Artificial Sequence: Synthetic peptide
  N-term H or Acetyl
  MOD_RES (8)..(8): Tyr or Phospho-Tyr
  MOD_RES (10)..(10): Modified Cys
  See specification as filed for detailed description of substitutions and preferred embodiments
SEELDENYVCMNPNS

SEQ ID NO: 975 - protein, 15 aa, Artificial Sequence
  Description of Artificial Sequence: Synthetic peptide
  N-term H or Acetyl
  MOD_RES (8)..(8): Tyr or Phospho-Tyr
  MOD_RES (10)..(10): Modified Cys
  See specification as filed for detailed description of substitutions and preferred embodiments
EPIQEANYVCMTPGT

SEQ ID NO: 976 - protein, 15 aa, Artificial Sequence
  Description of Artificial Sequence: Synthetic peptide
  N-term H or Acetyl
  MOD_RES (8)..(8): Tyr or Phospho-Tyr
  MOD_RES (10)..(10): Modified Cys
  See specification as filed for detailed description of substitutions and preferred embodiments
SHDSEENYVCMNPNL

SEQ ID NO: 977 - protein, 15 aa, Artificial Sequence
  Description of Artificial Sequence: Synthetic peptide
  N-term H or Acetyl
  MOD_RES (8)..(8): Tyr or Phospho-Tyr
  MOD_RES (10)..(10): Modified Cys
  See specification as filed for detailed description of substitutions and preferred embodiments
KGDKQVEYLCLDLDS

SEQ ID NO: 978 - protein, 15 aa, Artificial Sequence
  Description of Artificial Sequence: Synthetic peptide
  N-term H or Acetyl
  MOD_RES (8)..(8): Tyr or Phospho-Tyr
  MOD_RES (10)..(10): Modified Cys
  See specification as filed for detailed description of substitutions and preferred embodiments
VADERVDYVCVDQQK

SEQ ID NO: 979 - protein, 15 aa, Artificial Sequence
  Description of Artificial Sequence: Synthetic peptide
  N-term H or Acetyl
  MOD_RES (8)..(8): Tyr or Phospho-Tyr
  MOD_RES (10)..(10): Modified Cys
  See specification as filed for detailed description of substitutions and preferred embodiments
RNEEENIYSCPHDST

SEQ ID NO: 980 - protein, 15 aa, Artificial Sequence
  Description of Artificial Sequence: Synthetic peptide
  N-term H or Acetyl
  MOD_RES (6)..(6): Modified Cys
  MOD_RES (8)..(8): Tyr or Phospho-Tyr
  See specification as filed for detailed description of substitutions and preferred embodiments
SSTDRCPYEKVSAGN

SEQ ID NO: 981 - protein, 15 aa, Artificial Sequence
  Description of Artificial Sequence: Synthetic peptide
  N-term H or Acetyl
  MOD_RES (8)..(8): Tyr or Phospho-Tyr
  MOD_RES (10)..(10): Modified Cys
  See specification as filed for detailed description of substitutions and preferred embodiments
QLTFALRYLCFFTKA

SEQ ID NO: 982 - protein, 15 aa, Artificial Sequence
  Description of Artificial Sequence: Synthetic peptide
  N-term H or Acetyl
  MOD_RES (8)..(8): Tyr or Phospho-Tyr
  MOD_RES (10)..(10): Modified Cys
  See specification as filed for detailed description of substitutions and preferred embodiments
SSEPVGIYQCFEKKT

SEQ ID NO: 983 - protein, 15 aa, Artificial Sequence
  Description of Artificial Sequence: Synthetic peptide
  N-term H or Acetyl
  MOD_RES (6)..(6): Modified Cys
  MOD_RES (8)..(8): Tyr or Phospho-Tyr
  See specification as filed for detailed description of substitutions and preferred embodiments
MQDNSCTYGKIWEGS

SEQ ID NO: 984 - protein, 14 aa, Artificial Sequence
  Description of Artificial Sequence: Synthetic peptide
  N-term H or Acetyl
  MOD_RES (5)..(5): Modified Cys
  MOD_RES (7)..(7): Tyr or Phospho-Tyr
  See specification as filed for detailed description of substitutions and preferred embodiments
TDVECTYADFIASG

SEQ ID NO: 985 - protein, 15 aa, Artificial Sequence
  Description of Artificial Sequence: Synthetic peptide
  N-term H or Acetyl
  MOD_RES (8)..(8): Tyr or Phospho-Tyr
  MOD_RES (10)..(10): Modified Cys
  See specification as filed for detailed description of substitutions and preferred embodiments
EGSFESRYQCPFEDF

SEQ ID NO: 986 - protein, 15 aa, Artificial Sequence
  Description of Artificial Sequence: Synthetic peptide
  N-term H or Acetyl
  MOD_RES (6)..(6): Modified Cys
  MOD_RES (8)..(8): Tyr or Phospho-Tyr
  See specification as filed for detailed description of substitutions and preferred embodiments
IGTAECDYGALYEGR

SEQ ID NO: 987 - protein, 15 aa, Artificial Sequence
  Description of Artificial Sequence: Synthetic peptide
  N-term H or Acetyl
  MOD_RES (8)..(8): Tyr or Phospho-Tyr
  MOD_RES (10)..(10): Modified Cys
  See specification as filed for detailed description of substitutions and preferred embodiments
EGRNPGFYVCANPMP

SEQ ID NO: 988 - protein, 10 aa, Artificial Sequence
  Description of Artificial Sequence: Synthetic peptide
  N-term H or Acetyl
  MOD_RES (6)..(6): Modified Cys
  MOD_RES (8)..(8): Tyr or Phospho-Tyr
  See specification as filed for detailed description of substitutions and preferred embodiments
VTRRTCDYFL

SEQ ID NO: 989 - protein, 15 aa, Artificial Sequence
  Description of Artificial Sequence: Synthetic peptide
  N-term H or Acetyl
  MOD_RES (8)..(8): Tyr or Phospho-Tyr
  MOD_RES (10)..(10): Modified Cys
  See specification as filed for detailed description of substitutions and preferred embodiments
LHQEDNDYICASLIK

SEQ ID NO: 990 - protein, 15 aa, Artificial Sequence
  Description of Artificial Sequence: Synthetic peptide
  N-term H or Acetyl
  MOD_RES (8)..(8): Tyr or Phospho-Tyr
  MOD_RES (11)..(11): Modified Cys
  See specification as filed for detailed description of substitutions and preferred embodiments
LHQEDNDYINCSLIK

SEQ ID NO: 991 - protein, 15 aa, Artificial Sequence
  Description of Artificial Sequence: Synthetic peptide
  N-term H or Acetyl
  MOD_RES (8)..(8): Tyr or Phospho-Tyr
  MOD_RES (10)..(10): Modified Cys
  See specification as filed for detailed description of substitutions and preferred embodiments
TVDGKEIYNCIRRKT

SEQ ID NO: 992 - protein, 15 aa, Artificial Sequence
  Description of Artificial Sequence: Synthetic peptide
  N-term H or Acetyl
  MOD_RES (8)..(8): Tyr or Phospho-Tyr
  MOD_RES (10)..(10): Modified Cys
  See specification as filed for detailed description of substitutions and preferred embodiments
TLMEKDSYPCFLKSP

SEQ ID NO: 993 - protein, 15 aa, Artificial Sequence
  Description of Artificial Sequence: Synthetic peptide
  N-term H or Acetyl
  MOD_RES (6)..(6): Modified Cys
  MOD_RES (8)..(8): Tyr or Phospho-Tyr
  See specification as filed for detailed description of substitutions and preferred embodiments
EEPPDCQYYNDFPGK

SEQ ID NO: 994 - protein, 15 aa, Artificial Sequence
  Description of Artificial Sequence: Synthetic peptide
  N-term H or Acetyl
  MOD_RES (6)..(6): Modified Cys
  MOD_RES (8)..(8): Tyr or Phospho-Tyr
  MOD_RES (9)..(9): Tyr or Phospho-Tyr
  See specification as filed for detailed description of substitutions and preferred embodiments
EEPPDCQYYNDFPGK

SEQ ID NO: 995 - protein, 15 aa, Artificial Sequence
  Description of Artificial Sequence: Synthetic peptide
  N-term H or Acetyl
  MOD_RES (8)..(8): Tyr or Phospho-Tyr
  MOD_RES (10)..(10): Modified Cys
  See specification as filed for detailed description of substitutions and preferred embodiments
EPPDHQYYNCFPGKE

SEQ ID NO: 996 - protein, 15 aa, Artificial Sequence
  Description of Artificial Sequence: Synthetic peptide
  N-term H or Acetyl
  MOD_RES (8)..(8): Tyr or Phospho-Tyr
  MOD_RES (10)..(10): Modified Cys
  See specification as filed for detailed description of substitutions and preferred embodiments
ELFDDPSYVCVQNLD

SEQ ID NO: 997 - protein, 15 aa, Artificial Sequence
  Description of Artificial Sequence: Synthetic peptide
  N-term H or Acetyl
  MOD_RES (6)..(6): Modified Cys
  MOD_RES (8)..(8): Tyr or Phospho-Tyr
  See specification as filed for detailed description of substitutions and preferred embodiments
GDGSDCPYYNSIPSK

SEQ ID NO: 998 - protein, 15 aa, Artificial Sequence
  Description of Artificial Sequence: Synthetic peptide
  N-term H or Acetyl
  MOD_RES (6)..(6): Modified Cys
  MOD_RES (8)..(8): Tyr or Phospho-Tyr
  MOD_RES (9)..(9): Tyr or Phospho-Tyr
  See specification as filed for detailed description of substitutions and preferred embodiments
GDGSDCPYYNSIPSK

SEQ ID NO: 999 - protein, 15 aa, Artificial Sequence
  Description of Artificial Sequence: Synthetic peptide
  N-term H or Acetyl
  MOD_RES (8)..(8): Tyr or Phospho-Tyr
  MOD_RES (10)..(10): Modified Cys
  See specification as filed for detailed description of substitutions and preferred embodiments
DGSDHPYYNCIPSKM

SEQ ID NO: 1000 - protein, 15 aa, Artificial Sequence
  Description of Artificial Sequence: Synthetic peptide
  N-term H or Acetyl
  MOD_RES (6)..(6): Modified Cys
  MOD_RES (8)..(8): Tyr or Phospho-Tyr
  See specification as filed for detailed description of substitutions and preferred embodiments
FAGKECTYYQGRHLG

SEQ ID NO: 1001 - protein, 15 aa, Artificial Sequence
  Description of Artificial Sequence: Synthetic peptide
  N-term H or Acetyl
  MOD_RES (6)..(6): Modified Cys
  MOD_RES (8)..(8): Tyr or Phospho-Tyr
  MOD_RES (9)..(9): Tyr or Phospho-Tyr
  See specification as filed for detailed description of substitutions and preferred embodiments
FAGKECTYYQGRHLG

SEQ ID NO: 1002 - protein, 15 aa, Artificial Sequence
  Description of Artificial Sequence: Synthetic peptide
  N-term H or Acetyl
  MOD_RES (8)..(8): Tyr or Phospho-Tyr
  MOD_RES (10)..(10): Modified Cys
  See specification as filed for detailed description of substitutions and preferred embodiments
AGKEQTYYQCRHLGD

SEQ ID NO: 1003 - protein, 15 aa, Artificial Sequence
  Description of Artificial Sequence: Synthetic peptide
  N-term H or Acetyl
  MOD_RES (8)..(8): Tyr or Phospho-Tyr
  MOD_RES (10)..(10): Modified Cys
  See specification as filed for detailed description of substitutions and preferred embodiments
RQGSSDIYSCPEGKL

SEQ ID NO: 1004 - protein, 15 aa, Artificial Sequence
  Description of Artificial Sequence: Synthetic peptide
  N-term H or Acetyl
  MOD_RES (8)..(8): Tyr or Phospho-Tyr
  MOD_RES (10)..(10): Modified Cys
  See specification as filed for detailed description of substitutions and preferred embodiments
PTGEAPTYVCTQQIP

SEQ ID NO: 1005 - protein, 15 aa, Artificial Sequence
  Description of Artificial Sequence: Synthetic peptide
  N-term H or Acetyl
  MOD_RES (8)..(8): Tyr or Phospho-Tyr
  MOD_RES (10)..(10): Modified Cys
  See specification as filed for detailed description of substitutions and preferred embodiments
TENDDDVYRCLEELA

SEQ ID NO: 1006 - protein, 12 aa, Artificial Sequence
  Description of Artificial Sequence: Synthetic peptide
  N-term H or Acetyl
  MOD_RES (8)..(8): Tyr or Phospho-Tyr
  MOD_RES (10)..(10): Modified Cys
  See specification as filed for detailed description of substitutions and preferred embodiments
HDLGEDIYDCVP

SEQ ID NO: 1007 - protein, 12 aa, Artificial Sequence
  Description of Artificial Sequence: Synthetic peptide
  N-term H or Acetyl
  MOD_RES (8)..(8): Tyr or Phospho-Tyr
  MOD_RES (10)..(10): Modified Cys
  See specification as filed for detailed description of substitutions and preferred embodiments
HDLGEDIYDCVP

SEQ ID NO: 1008 - protein, 15 aa, Artificial Sequence
  Description of Artificial Sequence: Synthetic peptide
  N-term H or Acetyl
  MOD_RES (8)..(8): Tyr or Phospho-Tyr
  MOD_RES (10)..(10): Modified Cys
  See specification as filed for detailed description of substitutions and preferred embodiments
EDGGDDIYECIIKVE

SEQ ID NO: 1009 - protein, 15 aa, Artificial Sequence
  Description of Artificial Sequence: Synthetic peptide
  N-term H or Acetyl
  MOD_RES (8)..(8): Tyr or Phospho-Tyr
  MOD_RES (10)..(10): Modified Cys
  See specification as filed for detailed description of substitutions and preferred embodiments
EDGGDDIYECIIKVE

SEQ ID NO: 1010 - protein, 15 aa, Artificial Sequence
  Description of Artificial Sequence: Synthetic peptide
  N-term H or Acetyl
  MOD_RES (8)..(8): Tyr or Phospho-Tyr
  MOD_RES (10)..(10): Modified Cys
  See specification as filed for detailed description of substitutions and preferred embodiments
RNEGVATYACAVLFR

SEQ ID NO: 1011 - protein, 13 aa, Artificial Sequence
  Description of Artificial Sequence: Synthetic peptide
  N-term H or Acetyl
  MOD_RES (6)..(6): Tyr or Phospho-Tyr
  MOD_RES (8)..(8): Modified Cys
  See specification as filed for detailed description of substitutions and preferred embodiments
SPQPEYVCQPDVR

SEQ ID NO: 1012 - protein, 15 aa, Artificial Sequence
  Description of Artificial Sequence: Synthetic peptide
  N-term H or Acetyl
  MOD_RES (6)..(6): Modified Cys
  MOD_RES (8)..(8): Tyr or Phospho-Tyr
  See specification as filed for detailed description of substitutions and preferred embodiments
SPAFDCLYYWDQDPP

SEQ ID NO: 1013 - protein, 15 aa, Artificial Sequence
  Description of Artificial Sequence: Synthetic peptide
  N-term H or Acetyl
  MOD_RES (6)..(6): Modified Cys
  MOD_RES (8)..(8): Tyr or Phospho-Tyr
  MOD_RES (9)..(9): Tyr or Phospho-Tyr
  See specification as filed for detailed description of substitutions and preferred embodiments
SPAFDCLYYWDQDPP

SEQ ID NO: 1014 - protein, 15 aa, Artificial Sequence
  Description of Artificial Sequence: Synthetic peptide
  N-term H or Acetyl
  MOD_RES (8)..(8): Tyr or Phospho-Tyr
  MOD_RES (10)..(10): Modified Cys
  See specification as filed for detailed description of substitutions and preferred embodiments
PAFDNLYYWCQDPPE

SEQ ID NO: 1015 - protein, 15 aa, Artificial Sequence
  Description of Artificial Sequence: Synthetic peptide
  N-term H or Acetyl
  MOD_RES (8)..(8): Tyr or Phospho-Tyr
  MOD_RES (10)..(10): Modified Cys
  See specification as filed for detailed description of substitutions and preferred embodiments
PTAENPEYLCLDVPV

SEQ ID NO: 1016 - protein, 15 aa, Artificial Sequence
  Description of Artificial Sequence: Synthetic peptide
  N-term H or Acetyl
  MOD_RES (8)..(8): Tyr or Phospho-Tyr
  MOD_RES (10)..(10): Modified Cys
  See specification as filed for detailed description of substitutions and preferred embodiments
QALDNPEYHCASNGP

SEQ ID NO: 1017 - protein, 14 aa, Artificial Sequence
  Description of Artificial Sequence: Synthetic peptide
  N-term H or Acetyl
  MOD_RES (9)..(9): Tyr or Phospho-Tyr
  MOD_RES (11)..(11): Modified Cys
  See specification as filed for detailed description of substitutions and preferred embodiments
RRRAEEEEYICLVA

SEQ ID NO: 1018 - protein, 14 aa, Artificial Sequence
  Description of Artificial Sequence: Synthetic peptide
  N-term H or Acetyl
  MOD_RES (9)..(9): Tyr or Phospho-Tyr
  MOD_RES (11)..(11): Modified Cys
  See specification as filed for detailed description of substitutions and preferred embodiments
KKKAEEEEYICLVA

SEQ ID NO: 1019 - protein, 13 aa, Artificial Sequence
  Description of Artificial Sequence: Synthetic peptide
  N-term H or Acetyl
  MOD_RES (8)..(8): Tyr or Phospho-Tyr
  MOD_RES (10)..(10): Modified Cys
  See specification as filed for detailed description of substitutions and preferred embodiments
KKAEEEEYICLVA

SEQ ID NO: 1020 - protein, 12 aa, Artificial Sequence
  Description of Artificial Sequence: Synthetic peptide
  N-term H or Acetyl
  MOD_RES (7)..(7): Tyr or Phospho-Tyr
  MOD_RES (9)..(9): Modified Cys
  See specification as filed for detailed description of substitutions and preferred embodiments
KAEEEEYICLVA

SEQ ID NO: 1021 - protein, 9 aa, Artificial Sequence
  Description of Artificial Sequence: Synthetic peptide
  N-term H or Acetyl
  MOD_RES (5)..(5): Tyr or Phospho-Tyr
  MOD_RES (7)..(7): Modified Cys
  See specification as filed for detailed description of substitutions and preferred embodiments
EEPIYVCVP

SEQ ID NO: 1022 - protein, 9 aa, Artificial Sequence
  Description of Artificial Sequence: Synthetic peptide
  N-term H or Acetyl
  MOD_RES (5)..(5): Tyr or Phospho-Tyr
  MOD_RES (7)..(7): Modified Cys
  See specification as filed for detailed description of substitutions and preferred embodiments
EEPIYVCIK

SEQ ID NO: 1023 - protein, 9 aa, Artificial Sequence
  Description of Artificial Sequence: Synthetic peptide
  N-term H or Acetyl
  MOD_RES (5)..(5): Tyr or Phospho-Tyr
  MOD_RES (7)..(7): Modified Cys
  MOD_RES (8)..(8): Leu or Nle (i.e. isomer of Leucine)
  See specification as filed for detailed description of substitutions and preferred embodiments
EEPIYVCLP

SEQ ID NO: 1024 - protein, 9 aa, Artificial Sequence
  Description of Artificial Sequence: Synthetic peptide
  N-term H or Acetyl
  MOD_RES (5)..(5): Tyr or Phospho-Tyr
  MOD_RES (7)..(7): Modified Cys
  See specification as filed for detailed description of substitutions and preferred embodiments
EEPIYICVK

SEQ ID NO: 1025 - protein, 9 aa, Artificial Sequence
  Description of Artificial Sequence: Synthetic peptide
  N-term H or Acetyl
  MOD_RES (5)..(5): Tyr or Phospho-Tyr
  MOD_RES (7)..(7): Modified Cys
  See specification as filed for detailed description of substitutions and preferred embodiments
EEPIYVCVK

SEQ ID NO: 1026 - protein, 9 aa, Artificial Sequence
  Description of Artificial Sequence: Synthetic peptide
  N-term H or Acetyl
  MOD_RES (5)..(5): Tyr or Phospho-Tyr
  MOD_RES (7)..(7): Modified Cys
  See specification as filed for detailed description of substitutions and preferred embodiments
EEPIYICWP

SEQ ID NO: 1027 - protein, 9 aa, Artificial Sequence
  Description of Artificial Sequence: Synthetic peptide
  N-term H or Acetyl
  MOD_RES (5)..(5): Tyr or Phospho-Tyr
  MOD_RES (7)..(7): Modified Cys
  See specification as filed for detailed description of substitutions and preferred embodiments
EEPIYVCWK

SEQ ID NO: 1028 - protein, 9 aa, Artificial Sequence
  Description of Artificial Sequence: Synthetic peptide
  N-term H or Acetyl
  MOD_RES (5)..(5): Tyr or Phospho-Tyr
  MOD_RES (7)..(7): Modified Cys
  See specification as filed for detailed description of substitutions and preferred embodiments
EEPDYICVP

SEQ ID NO: 1029 - protein, 9 aa, Artificial Sequence
  Description of Artificial Sequence: Synthetic peptide
  N-term H or Acetyl
  MOD_RES (5)..(5): Tyr or Phospho-Tyr
  MOD_RES (7)..(7): Modified Cys
  See specification as filed for detailed description of substitutions and preferred embodiments
EEPEYICVP

SEQ ID NO: 1030 - protein, 9 aa, Artificial Sequence
  Description of Artificial Sequence: Synthetic peptide
  N-term H or Acetyl
  MOD_RES (5)..(5): Tyr or Phospho-Tyr
  MOD_RES (7)..(7): Modified Cys
  See specification as filed for detailed description of substitutions and preferred embodiments
EEPDYVCMK

SEQ ID NO: 1031 - protein, 9 aa, Artificial Sequence
  Description of Artificial Sequence: Synthetic peptide
  N-term H or Acetyl
  MOD_RES (5)..(5): Tyr or Phospho-Tyr
  MOD_RES (7)..(7): Modified Cys
  See specification as filed for detailed description of substitutions and preferred embodiments
DEQIYWCIA

SEQ ID NO: 1032 - protein, 12 aa, Artificial Sequence
  Description of Artificial Sequence: Synthetic peptide
  N-term H or Acetyl
  MOD_RES (8)..(8): Tyr or Phospho-Tyr
  MOD_RES (10)..(10): Modified Cys
  See specification as filed for detailed description of substitutions and preferred embodiments
KKKDEQIYWCIA

SEQ ID NO: 1033 - protein, 23 aa, Artificial Sequence
  Description of Artificial Sequence: Synthetic peptide
  N-term H or Acetyl
  MOD_RES (19)..(19): Ser or Phospho-Ser
  MOD_RES (21)..(21): Modified Cys
  See specification as filed for detailed description of substitutions and preferred embodiments
SSKRAKAKTTKKRPQRATSNCFS

SEQ ID NO: 1034 - protein, 18 aa, Artificial Sequence
  Description of Artificial Sequence: Synthetic peptide
  N-term H or Acetyl
  MOD_RES (14)..(14): Ser or Phospho-Ser
  MOD_RES (16)..(16): Modified Cys
  See specification as filed for detailed description of substitutions and preferred embodiments
KAKTTKKRPQRATSNCFS

SEQ ID NO: 1035 - protein, 16 aa, Artificial Sequence
  Description of Artificial Sequence: Synthetic peptide
  N-term H or Acetyl
  MOD_RES (12)..(12): Ser or Phospho-Ser
  MOD_RES (14)..(14): Modified Cys
  See specification as filed for detailed description of substitutions and preferred embodiments
KTTKKRPQRATSNCFS

SEQ ID NO: 1036 - protein, 14 aa, Artificial Sequence
  Description of Artificial Sequence: Synthetic peptide
  N-term H or Acetyl
  MOD_RES (9)..(9): Ser or Phospho-Ser
  MOD_RES (11)..(11): Modified Cys
  See specification as filed for detailed description of substitutions and preferred embodiments
KKRPQRATSNCFAM

SEQ ID NO: 1037 - protein, 12 aa, Artificial Sequence
  Description of Artificial Sequence: Synthetic peptide
  N-term H or Acetyl
  MOD_RES (5)..(5): Ser or Phospho-Ser
  MOD_RES (7)..(7): Modified Cys
  See specification as filed for detailed description of substitutions and preferred embodiments
QETFSDCWKLLP

SEQ ID NO: 1038 - protein, 12 aa, Artificial Sequence
  Description of Artificial Sequence: Synthetic peptide
  N-term H or Acetyl
  MOD_RES (3)..(3): Modified Cys
  MOD_RES (5)..(5): Ser or Phospho-Ser
  See specification as filed for detailed description of substitutions and preferred embodiments
QECFSDLWKLLP

SEQ ID NO: 1039 - protein, 22 aa, Artificial Sequence
  Description of Artificial Sequence: Synthetic peptide
  N-term H or Acetyl
  MOD_RES (6)..(6): Modified Cys
  MOD_RES (8)..(8): Ser or Phospho-Ser
  See specification as filed for detailed description of substitutions and preferred embodiments
VSGQLCDSMANSFVGTRSYKKK

SEQ ID NO: 1040 - protein, 22 aa, Artificial Sequence
  Description of Artificial Sequence: Synthetic peptide
  N-term H or Acetyl
  MOD_RES (11)..(11): Ser or Phospho-Ser
  MOD_RES (13)..(13): Modified Cys
  See specification as filed for detailed description of substitutions and preferred embodiments
KKKVSGQLIDSMCNSFVGTRSY

SEQ ID NO: 1041 - protein, 22 aa, Artificial Sequence
  Description of Artificial Sequence: Synthetic peptide
  N-term H or Acetyl
  MOD_RES (13)..(13): Modified Cys
  MOD_RES (15)..(15): Ser or Phospho-Ser
  See specification as filed for detailed description of substitutions and preferred embodiments
KKKVSGQLIDSMCNSFVGTRSY

SEQ ID NO: 1042 - protein, 22 aa, Artificial Sequence
  Description of Artificial Sequence: Synthetic peptide
  N-term H or Acetyl
  MOD_RES (15)..(15): Ser or Phospho-Ser
  MOD_RES (17)..(17): Modified Cys
  See specification as filed for detailed description of substitutions and preferred embodiments
KKKVSGQLIDSMANSFCGTRSY

SEQ ID NO: 1043 - protein, 25 aa, Artificial Sequence
  Description of Artificial Sequence: Synthetic peptide
  N-term H or Acetyl
  MOD_RES (11)..(11): Ser or Phospho-Ser
  MOD_RES (13)..(13): Modified Cys
  See specification as filed for detailed description of substitutions and preferred embodiments
KKCVSGQLIDSMCNSFVGTRSYCKK

SEQ ID NO: 1044 - protein, 25 aa, Artificial Sequence
  Description of Artificial Sequence: Synthetic peptide
  N-term H or Acetyl
  MOD_RES (13)..(13): Modified Cys
  MOD_RES (15)..(15): Ser or Phospho-Ser
  See specification as filed for detailed description of substitutions and preferred embodiments
KKCVSGQLIDSMCNSFVGTRSYCKK

SEQ ID NO: 1045 - protein, 26 aa, Artificial Sequence
  Description of Artificial Sequence: Synthetic peptide
  N-term H or Acetyl
  MOD_RES (7)..(7): Modified Cys
  MOD_RES (10)..(10): Ser or Phospho-Ser
  See specification as filed for detailed description of substitutions and preferred embodiments
GYAKDVCQGSLCTSFVGTLQYLAKKK

SEQ ID NO: 1046 - protein, 26 aa, Artificial Sequence
  Description of Artificial Sequence: Synthetic peptide
  N-term H or Acetyl
  MOD_RES (10)..(10): Ser or Phospho-Ser
  MOD_RES (12)..(12): Modified Cys
  See specification as filed for detailed description of substitutions and preferred embodiments
GYAKDVDQGSLCTSFVGTLQYLAKKK

SEQ ID NO: 1047 - protein, 26 aa, Artificial Sequence
  Description of Artificial Sequence: Synthetic peptide
  N-term H or Acetyl
  MOD_RES (12)..(12): Modified Cys
  MOD_RES (14)..(14): Ser or Phospho-Ser
  See specification as filed for detailed description of substitutions and preferred embodiments
GYAKDVDQGSLCTSFVGTLQYLAKKK

SEQ ID NO: 1048 - protein, 23 aa, Artificial Sequence
  Description of Artificial Sequence: Synthetic peptide
  N-term H or Acetyl
  MOD_RES (14)..(14): Ser or Phospho-Ser
  MOD_RES (16)..(16): Modified Cys
  See specification as filed for detailed description of substitutions and preferred embodiments
GYAKDVDQGSLCTSFCGTLQYLA

SEQ ID NO: 1049 - protein, 30 aa, Artificial Sequence
  Description of Artificial Sequence: Synthetic polypeptide
  N-term H or Acetyl
  MOD_RES (9)..(9): Modified Cys
  MOD_RES (12)..(12): Ser or Phospho-Ser
  See specification as filed for detailed description of substitutions and preferred embodiments
DLGYAKDVCQGSLCTSFVGTLQYLAPEKKK

SEQ ID NO: 1050 - protein, 27 aa, Artificial Sequence
  Description of Artificial Sequence: Synthetic peptide
  N-term H or Acetyl
  MOD_RES (12)..(12): Ser or Phospho-Ser
  MOD_RES (14)..(14): Modified Cys
  See specification as filed for detailed description of substitutions and preferred embodiments
DLGYAKDVDQGSLCTSFVGTLQYLAPE

SEQ ID NO: 1051 - protein, 27 aa, Artificial Sequence
  Description of Artificial Sequence: Synthetic peptide
  N-term H or Acetyl
  MOD_RES (14)..(14): Modified Cys
  MOD_RES (16)..(16): Ser or Phospho-Ser
  See specification as filed for detailed description of substitutions and preferred embodiments
DLGYAKDVDQGSLCTSFVGTLQYLAPE

SEQ ID NO: 1052 - protein, 27 aa, Artificial Sequence
  Description of Artificial Sequence: Synthetic peptide
  N-term H or Acetyl
  MOD_RES (16)..(16): Ser or Phospho-Ser
  MOD_RES (18)..(18): Modified Cys
  See specification as filed for detailed description of substitutions and preferred embodiments
DLGYAKDVDQGSLCTSFCGTLQYLAPE

SEQ ID NO: 1053 - protein, 33 aa, Artificial Sequence
  Description of Artificial Sequence: Synthetic polypeptide
  N-term H or Acetyl
  MOD_RES (15)..(15): Ser or Phospho-Ser
  MOD_RES (17)..(17): Modified Cys
  See specification as filed for detailed description of substitutions and preferred embodiments
KKCDLGYAKDVDQGSLCTSFVGTLQYLAPECKK

SEQ ID NO: 1054 - protein, 33 aa, Artificial Sequence; identical to SEQ ID NO: 1053
  Description of Artificial Sequence: Synthetic polypeptide
  N-term H or Acetyl
  MOD_RES (17)..(17): Modified Cys
  MOD_RES (19)..(19): Ser or Phospho-Ser
  See specification as filed for detailed description of substitutions and preferred embodiments

SEQ ID NO: 1055 - protein, 7 aa, Artificial Sequence
  Description of Artificial Sequence: Synthetic peptide
  N-term H or Acetyl
  MOD_RES (1)..(1): Modified Cys
  MOD_RES (3)..(3): Ser or Phospho-Ser
  See specification as filed for detailed description of substitutions and preferred embodiments
CLSFRRR

SEQ ID NO: 1056 - protein, 16 aa, Artificial Sequence
  Description of Artificial Sequence: Synthetic peptide
  N-term H or Acetyl
  MOD_RES (10)..(10): Ser or Phospho-Ser
  MOD_RES (12)..(12): Modified Cys
  See specification as filed for detailed description of substitutions and preferred embodiments
GKKALRRQESVCALGW

SEQ ID NO: 1057 - protein, 12 aa, Artificial Sequence
  Description of Artificial Sequence: Synthetic peptide
  N-term H or Acetyl
  MOD_RES (7)..(7): Ser or Phospho-Ser
  MOD_RES (9)..(9): Modified Cys
  See specification as filed for detailed description of substitutions and preferred embodiments
GNLLPMSPCEFD

SEQ ID NO: 1058 - protein, 13 aa, Artificial Sequence
  Description of Artificial Sequence: Synthetic peptide
  N-term H or Acetyl
  MOD_RES (4)..(4): Ser or Phospho-Ser
  MOD_RES (6)..(6): Modified Cys
  See specification as filed for detailed description of substitutions and preferred embodiments
IPTSPCTTTYFFF

SEQ ID NO: 1059 - protein, 13 aa, Artificial Sequence
  Description of Artificial Sequence: Synthetic peptide
  N-term H or Acetyl
  MOD_RES (2)..(2): Modified Cys
  MOD_RES (4)..(4): Ser or Phospho-Ser
  See specification as filed for detailed description of substitutions and preferred embodiments
ICTSPITTTYFFF

SEQ ID NO: 1060 - protein, 16 aa, Artificial Sequence
  Description of Artificial Sequence: Synthetic peptide
  N-term H or Acetyl
  MOD_RES (4)..(4): Ser or Phospho-Ser
  MOD_RES (6)..(6): Modified Cys
  See specification as filed for detailed description of substitutions and preferred embodiments
IPTSPCTTTYFFFKKK

SEQ ID NO: 1061 - protein, 14 aa, Artificial Sequence
  Description of Artificial Sequence: Synthetic peptide
  N-term H or Acetyl
  MOD_RES (7)..(7): Thr or Phospho-Thr
  MOD_RES (9)..(9): Modified Cys
  See specification as filed for detailed description of substitutions and preferred embodiments
VADQTPTPCRFLKN

SEQ ID NO: 1062 - protein, 14 aa, Artificial Sequence
  Description of Artificial Sequence: Synthetic peptide
  N-term H or Acetyl
  MOD_RES (3)..(3): Modified Cys
  MOD_RES (5)..(5): Thr or Phospho-Thr
  MOD_RES (7)..(7): Thr or Phospho-Thr
  See specification as filed for detailed description of substitutions and preferred embodiments
VACQTPTPTRFLKN

SEQ ID NO: 1063 - protein, 15 aa, Artificial Sequence
  Description of Artificial Sequence: Synthetic peptide
  N-term H or Acetyl
  MOD_RES (8)..(8): Thr or Phospho-Thr
  MOD_RES (10)..(10): Modified Cys
  See specification as filed for detailed description of substitutions and preferred embodiments
IDQGDLMTPCFTPYY

SEQ ID NO: 1064 - protein, 15 aa, Artificial Sequence
  Description of Artificial Sequence: Synthetic peptide
  N-term H or Acetyl
  MOD_RES (6)..(6): Modified Cys
  MOD_RES (8)..(8): Thr or Phospho-Thr
  See specification as filed for detailed description of substitutions and preferred embodiments
IDQGDCMTPQFTPYY

SEQ ID NO: 1065 - protein, 15 aa, Artificial Sequence
  Description of Artificial Sequence: Synthetic peptide
  N-term H or Acetyl
  MOD_RES (8)..(8): Ser or Phospho-Ser
  MOD_RES (10)..(10): Modified Cys
  See specification as filed for detailed description of substitutions and preferred embodiments
TPPEELPSPCASSLG

SEQ ID NO: 1066 - protein, 15 aa, Artificial Sequence
  Description of Artificial Sequence: Synthetic peptide
  N-term H or Acetyl
  MOD_RES (6)..(6): Modified Cys
  MOD_RES (8)..(8): Ser or Phospho-Ser
  See specification as filed for detailed description of substitutions and preferred embodiments
TPPEECPSPSASSLG

SEQ ID NO: 1067 - protein, 15 aa, Artificial Sequence
  Description of Artificial Sequence: Synthetic peptide
  N-term H or Acetyl
  MOD_RES (8)..(8): Ser or Phospho-Ser
  MOD_RES (10)..(10): Modified Cys
  See specification as filed for detailed description of substitutions and preferred embodiments
NTIDLPMSPCTLDSL

SEQ ID NO: 1068 - protein, 15 aa, Artificial Sequence
  Description of Artificial Sequence: Synthetic peptide
  N-term H or Acetyl
  MOD_RES (6)..(6): Modified Cys
  MOD_RES (8)..(8): Ser or Phospho-Ser
  See specification as filed for detailed description of substitutions and preferred embodiments
NTIDLCMSPRTLDSL

SEQ ID NO: 1069 - protein, 18 aa, Artificial Sequence
  Description of Artificial Sequence: Synthetic peptide
  N-term H or Acetyl
  MOD_RES (11)..(11): Ser or Phospho-Ser
  MOD_RES (13)..(13): Modified Cys
  See specification as filed for detailed description of substitutions and preferred embodiments
KKKESTSAPLSPCVTTSP

SEQ ID NO: 1070 - protein, 15 aa, Artificial Sequence
  Description of Artificial Sequence: Synthetic peptide
  N-term H or Acetyl
  MOD_RES (8)..(8): Ser or Phospho-Ser
  MOD_RES (10)..(10): Modified Cys
  See specification as filed for detailed description of substitutions and preferred embodiments
GFLSRPLSPCFTTSP

SEQ ID NO: 1071 - protein, 15 aa, Artificial Sequence
  Description of Artificial Sequence: Synthetic peptide
  N-term H or Acetyl
  MOD_RES (8)..(8): Ser or Phospho-Ser
  MOD_RES (10)..(10): Modified Cys
  See specification as filed for detailed description of substitutions and preferred embodiments
PSLLRPLSPCFFGAY

SEQ ID NO: 1072 - protein, 18 aa, Artificial Sequence
  Description of Artificial Sequence: Synthetic peptide
  N-term H or Acetyl
  MOD_RES (11)..(11): Ser or Phospho-Ser
  MOD_RES (13)..(13): Modified Cys
  See specification as filed for detailed description of substitutions and preferred embodiments
KKKSTPSSPSSPCSSVAY

SEQ ID NO: 1073 - protein, 18 aa, Artificial Sequence
  Description of Artificial Sequence: Synthetic peptide
  N-term H or Acetyl
  MOD_RES (11)..(11): Ser or Phospho-Ser
  MOD_RES (13)..(13): Modified Cys
  See specification as filed for detailed description of substitutions and preferred embodiments
KKKSHGSAPLSPCAPLTS

SEQ ID NO: 1074 - protein, 18 aa, Artificial Sequence
  Description of Artificial Sequence: Synthetic peptide
  N-term H or Acetyl
  MOD_RES (11)..(11): Ser or Phospho-Ser
  MOD_RES (13)..(13): Modified Cys
  See specification as filed for detailed description of substitutions and preferred embodiments
KKKSPFSVLSSPCSGHSN

SEQ ID NO: 1075 - protein, 15 aa, Artificial Sequence
  Description of Artificial Sequence: Synthetic peptide
  N-term H or Acetyl
  MOD_RES (8)..(8): Ser or Phospho-Ser
  MOD_RES (10)..(10): Modified Cys
  See specification as filed for detailed description of substitutions and preferred embodiments
TEERLPSSPCYEDAA

SEQ ID NO: 1076 - protein, 15 aa, Artificial Sequence
  Description of Artificial Sequence: Synthetic peptide
  N-term H or Acetyl
  MOD_RES (6)..(6): Modified Cys
  MOD_RES (8)..(8): Ser or Phospho-Ser
  See specification as filed for detailed description of substitutions and preferred embodiments
TEERLCSSPVYEDAA

SEQ ID NO: 1077 - protein, 15 aa, Artificial Sequence
  Description of Artificial Sequence: Synthetic peptide
  N-term H or Acetyl
  MOD_RES (8)..(8): Ser or Phospho-Ser
  MOD_RES (10)..(10): Modified Cys
  See specification as filed for detailed description of substitutions and preferred embodiments
SNGRRKRSPCQSFRF

SEQ ID NO: 1078 - protein, 15 aa, Artificial Sequence
  Description of Artificial Sequence: Synthetic peptide
  N-term H or Acetyl
  MOD_RES (6)..(6): Modified Cys
  MOD_RES (8)..(8): Ser or Phospho-Ser
  See specification as filed for detailed description of substitutions and preferred embodiments
SNGRRCRSPTQSFRF

SEQ ID NO: 1079 - protein, 15 aa, Artificial Sequence
  Description of Artificial Sequence: Synthetic peptide
  N-term H or Acetyl
  MOD_RES (8)..(8): Ser or Phospho-Ser
  MOD_RES (10)..(10): Modified Cys
  See specification as filed for detailed description of substitutions and preferred embodiments
EENVSDGSPCAGSVE

SEQ ID NO: 1080 - protein, 15 aa, Artificial Sequence
  Description of Artificial Sequence: Synthetic peptide
  N-term H or Acetyl
  MOD_RES (5)..(5): Modified Cys
  MOD_RES (8)..(8): Ser or Phospho-Ser
  See specification as filed for detailed description of substitutions and preferred embodiments
EENVCDGSPNAGSVE

SEQ ID NO: 1081 - protein, 15 aa, Artificial Sequence
  Description of Artificial Sequence: Synthetic peptide
  N-term H or Acetyl
  MOD_RES (8)..(8): Thr or Phospho-Thr
  MOD_RES (10)..(10): Modified Cys
  See specification as filed for detailed description of substitutions and preferred embodiments
APEKGLPTPCVLQRN

SEQ ID NO: 1082 - protein, 15 aa, Artificial Sequence
  Description of Artificial Sequence: Synthetic peptide
  N-term H or Acetyl
  MOD_RES (6)..(6): Modified Cys
  MOD_RES (8)..(8): Thr or Phospho-Thr
  See specification as filed for detailed description of substitutions and preferred embodiments
APEKGCPTPQVLQRN

SEQ ID NO: 1083 - protein, 15 aa, Artificial Sequence
  Description of Artificial Sequence: Synthetic peptide
  N-term H or Acetyl
  MOD_RES (8)..(8): Thr or Phospho-Thr
  MOD_RES (10)..(10): Modified Cys
  See specification as filed for detailed description of substitutions and preferred embodiments
LIDATGDTPCAEDDE

SEQ ID NO: 1084 - protein, 15 aa, Artificial Sequence
  Description of Artificial Sequence: Synthetic peptide
  N-term H or Acetyl
  MOD_RES (6)..(6): Modified Cys
  MOD_RES (8)..(8): Thr or Phospho-Thr
  See specification as filed for detailed description of substitutions and preferred embodiments
LIDATCDTPGAEDDE

SEQ ID NO: 1085 - protein, 15 aa, Artificial Sequence
  Description of Artificial Sequence: Synthetic peptide
  N-term H or Acetyl
  MOD_RES (8)..(8): Thr or Phospho-Thr
  MOD_RES (10)..(10): Modified Cys
  See specification as filed for detailed description of substitutions and preferred embodiments
VEVDPMLTPCERHLN

SEQ ID NO: 1086 - protein, 15 aa, Artificial Sequence
  Description of Artificial Sequence: Synthetic peptide
  N-term H or Acetyl
  MOD_RES (6)..(6): Modified Cys
  MOD_RES (8)..(8): Thr or Phospho-Thr
  See specification as filed for detailed description of substitutions and preferred embodiments
VEVDPCLTPEERHLN

SEQ ID NO: 1087 - protein, 15 aa, Artificial Sequence
  Description of Artificial Sequence: Synthetic peptide
  N-term H or Acetyl
  MOD_RES (8)..(8): Ser or Phospho-Ser
  MOD_RES (10)..(10): Modified Cys
  See specification as filed for detailed description of substitutions and preferred embodiments
EEYETPESPCPPARS

SEQ ID NO: 1088 - protein, 15 aa, Artificial Sequence
  Description of Artificial Sequence: Synthetic peptide
  N-term H or Acetyl
  MOD_RES (6)..(6): Modified Cys
  MOD_RES (8)..(8): Ser or Phospho-Ser
  See specification as filed for detailed description of substitutions and preferred embodiments
EEYETCESPVPPARS

SEQ ID NO: 1089 - protein, 15 aa, Artificial Sequence
  Description of Artificial Sequence: Synthetic peptide
  N-term H or Acetyl
  MOD_RES (8)..(8): Ser or Phospho-Ser
  MOD_RES (10)..(10): Modified Cys
  See specification as filed for detailed description of substitutions and preferred embodiments
PAADAIMSPCEELDG

SEQ ID NO: 1090 - protein, 15 aa, Artificial Sequence
  Description of Artificial Sequence: Synthetic peptide
  N-term H or Acetyl
  MOD_RES (6)..(6): Modified Cys
  MOD_RES (8)..(8): Ser or Phospho-Ser
  See specification as filed for detailed description of substitutions and preferred embodiments
PAADACMSPEEELDG

SEQ ID NO: 1091 - protein, 15 aa, Artificial Sequence
  Description of Artificial Sequence: Synthetic peptide
  N-term H or Acetyl
  MOD_RES (8)..(8): Ser or Phospho-Ser
  MOD_RES (10)..(10): Modified Cys
  See specification as filed for detailed description of substitutions and preferred embodiments
VLSRQITSPCSGING

SEQ ID NO: 1092 - protein, 15 aa, Artificial Sequence
  Description of Artificial Sequence: Synthetic peptide
  N-term H or Acetyl
  MOD_RES (6)..(6): Modified Cys
  MOD_RES (8)..(8): Ser or Phospho-Ser
  See specification as filed for detailed description of substitutions and preferred embodiments
VLSRQCTSPVSGING

SEQ ID NO: 1093 - protein, 15 aa, Artificial Sequence
  Description of Artificial Sequence: Synthetic peptide
  N-term H or Acetyl
  MOD_RES (8)..(8): Ser or Phospho-Ser
  MOD_RES (10)..(10): Modified Cys
  See specification as filed for detailed description of substitutions and preferred embodiments
RSKSAPTSPCDQEIK

SEQ ID NO: 1094 - protein, 15 aa, Artificial Sequence
  Description of Artificial Sequence: Synthetic peptide
  N-term H or Acetyl
  MOD_RES (8)..(8): Ser or Phospho-Ser
  MOD_RES (10)..(10): Modified Cys
  See specification as filed for detailed description of substitutions and preferred embodiments
TPPQEHISPCITNEV

SEQ ID NO: 1095 - protein, 15 aa, Artificial Sequence
  Description of Artificial Sequence: Synthetic peptide
  N-term H or Acetyl
  MOD_RES (6)..(6): Modified Cys
  MOD_RES (8)..(8): Ser or Phospho-Ser
  See specification as filed for detailed description of substitutions and preferred embodiments
TPPQECISPQITNEV

SEQ ID NO: 1096 - protein, 14 aa, Artificial Sequence
  Description of Artificial Sequence: Synthetic peptide
  N-term H or Acetyl
  MOD_RES (8)..(8): Ser or Phospho-Ser
  MOD_RES (10)..(10): Modified Cys
  See specification as filed for detailed description of substitutions and preferred embodiments
LSTPVVLSPCPQKP

SEQ ID NO: 1097 - protein, 14 aa, Artificial Sequence
  Description of Artificial Sequence: Synthetic peptide
  N-term H or Acetyl
  MOD_RES (6)..(6): Modified Cys
  MOD_RES (8)..(8): Ser or Phospho-Ser
  See specification as filed for detailed description of substitutions and preferred embodiments
LSTPVCLSPGPQKP

SEQ ID NO: 1098 - protein, 15 aa, Artificial Sequence
  Description of Artificial Sequence: Synthetic peptide
  N-term H or Acetyl
  MOD_RES (8)..(8): Ser or Phospho-Ser
  MOD_RES (10)..(10): Modified Cys
  See specification as filed for detailed description of substitutions and preferred embodiments
QLSKWPGSPCSRSSD

SEQ ID NO: 1099 - protein, 15 aa, Artificial Sequence
  Description of Artificial Sequence: Synthetic peptide
  N-term H or Acetyl
  MOD_RES (8)..(8): Thr or Phospho-Thr
  MOD_RES (10)..(10): Modified Cys
  See specification as filed for detailed description of substitutions and preferred embodiments
KNIVTPRTPCPSQGK

SEQ ID NO: 1100 - protein, 15 aa, Artificial Sequence
  Description of Artificial Sequence: Synthetic peptide
  N-term H or Acetyl
  MOD_RES (6)..(6): Modified Cys
  MOD_RES (8)..(8): Thr or Phospho-Thr
  See specification as filed for detailed description of substitutions and preferred embodiments
KNIVTCRTPPPSQGK

SEQ ID NO: 1101 - protein, 15 aa, Artificial Sequence
  Description of Artificial Sequence: Synthetic peptide
  N-term H or Acetyl
  MOD_RES (8)..(8): Thr or Phospho-Thr
  MOD_RES (10)..(10): Modified Cys
  See specification as filed for detailed description of substitutions and preferred embodiments
SGVEVRVTPCRTEII

SEQ ID NO: 1102 - protein, 15 aa, Artificial Sequence
  Description of Artificial Sequence: Synthetic peptide
  N-term H or Acetyl
  MOD_RES (6)..(6): Modified Cys
  MOD_RES (8)..(8): Thr or Phospho-Thr
  See specification as filed for detailed description of substitutions and preferred embodiments
SGVEVCVTPTRTEII

SEQ ID NO: 1103 - protein, 15 aa, Artificial Sequence
  Description of Artificial Sequence: Synthetic peptide
  N-term H or Acetyl
  MOD_RES (8)..(8): Ser or Phospho-Ser
  MOD_RES (10)..(10): Modified Cys
  See specification as filed for detailed description of substitutions and preferred embodiments
SRRSGLSSPCYVAVT

SEQ ID NO: 1104 - protein, 15 aa, Artificial Sequence
  Description of Artificial Sequence: Synthetic peptide
  N-term H or Acetyl
  MOD_RES (6)..(6): Modified Cys
  MOD_RES (8)..(8): Ser or Phospho-Ser
  See specification as filed for detailed description of substitutions and preferred embodiments
SRRSGCSSPSYVAVT

SEQ ID NO: 1105 - protein, 15 aa, Artificial Sequence
  Description of Artificial Sequence: Synthetic peptide
  N-term H or Acetyl
  MOD_RES (8)..(8): Ser or Phospho-Ser
  MOD_RES (10)..(10): Modified Cys
  See specification as filed for detailed description of substitutions and preferred embodiments
TFDSLPSSPCSATPH

SEQ ID NO: 1106 - protein, 15 aa, Artificial Sequence
  Description of Artificial Sequence: Synthetic peptide
  N-term H or Acetyl
  MOD_RES (6)..(6): Modified Cys
  MOD_RES (8)..(8): Ser or Phospho-Ser
  See specification as filed for detailed description of substitutions and preferred embodiments
TFDSLCSSPSSATPH

SEQ ID NO: 1107 - protein, 15 aa, Artificial Sequence
  Description of Artificial Sequence: Synthetic peptide
  N-term H or Acetyl
  MOD_RES (8)..(8): Ser or Phospho-Ser
  MOD_RES (10)..(10): Modified Cys
  See specification as filed for detailed description of substitutions and preferred embodiments
PVVSGDTSPCHLSNV

SEQ ID NO: 1108 - protein, 15 aa, Artificial Sequence
  Description of Artificial Sequence: Synthetic peptide
  N-term H or Acetyl
  MOD_RES (6)..(6): Modified Cys
  MOD_RES (8)..(8): Ser or Phospho-Ser
  See specification as filed for detailed description of substitutions and preferred embodiments
PVVSGCTSPRHLSNV

SEQ ID NO: 1109 - protein, 15 aa, Artificial Sequence
  Description of Artificial Sequence: Synthetic peptide
  N-term H or Acetyl
  MOD_RES (8)..(8): Ser or Phospho-Ser
  MOD_RES (10)..(10): Modified Cys
  See specification as filed for detailed description of substitutions and preferred embodiments
PTIPGVTSPCSDEPP

SEQ ID NO: 1110 - protein, 15 aa, Artificial Sequence
  Description of Artificial Sequence: Synthetic peptide
  N-term H or Acetyl
  MOD_RES (8)..(8): Thr or Phospho-Thr
  MOD_RES (10)..(10): Modified Cys
  See specification as filed for detailed description of substitutions and preferred embodiments
SRSHSAKTPCFSVQS

SEQ ID NO: 1111 - protein, 15 aa, Artificial Sequence
  Description of Artificial Sequence: Synthetic peptide
  N-term H or Acetyl
  MOD_RES (8)..(8): Ser or Phospho-Ser
  MOD_RES (10)..(10): Modified Cys
  See specification as filed for detailed description of substitutions and preferred embodiments
GHVEEPASPCAAYQK

SEQ ID NO: 1112 - protein, 15 aa, Artificial Sequence
  Description of Artificial Sequence: Synthetic peptide
  N-term H or Acetyl
  MOD_RES (8)..(8): Thr or Phospho-Thr
  MOD_RES (10)..(10): Modified Cys
  See specification as filed for detailed description of substitutions and preferred embodiments
QGPAPVGTPCFNRQH

SEQ ID NO: 1113 - protein, 15 aa, Artificial Sequence
  Description of Artificial Sequence: Synthetic peptide
  N-term H or Acetyl
  MOD_RES (8)..(8): Thr or Phospho-Thr
  MOD_RES (10)..(10): Modified Cys
  See specification as filed for detailed description of substitutions and preferred embodiments
LLSNASATPCGRRGR

SEQ ID NO: 1114 - protein, 15 aa, Artificial Sequence
  Description of Artificial Sequence: Synthetic peptide
  N-term H or Acetyl
  MOD_RES (8)..(8): Thr or Phospho-Thr
  MOD_RES (10)..(10): Modified Cys
  See specification as filed for detailed description of substitutions and preferred embodiments
QARAKTQTPCVSPAP

SEQ ID NO: 1115 - protein, 15 aa, Artificial Sequence
  Description of Artificial Sequence: Synthetic peptide
  N-term H or Acetyl
  MOD_RES (6)..(6): Modified Cys
  MOD_RES (8)..(8): Thr or Phospho-Thr
  See specification as filed for detailed description of substitutions and preferred embodiments
QARAKCQTPPVSPAP

SEQ ID NO: 1116 - protein, 15 aa, Artificial Sequence
  Description of Artificial Sequence: Synthetic peptide
  N-term H or Acetyl
  MOD_RES (8)..(8): Thr or Phospho-Thr
  MOD_RES (10)..(10): Modified Cys
  See specification as filed for detailed description of substitutions and preferred embodiments
VSYEDPPTACAAVEW

SEQ ID NO: 1117 - protein, 15 aa, Artificial Sequence
  Description of Artificial Sequence: Synthetic peptide
  N-term H or Acetyl
  MOD_RES (8)..(8): Thr or Phospho-Thr
  MOD_RES (10)..(10): Modified Cys
  See specification as filed for detailed description of substitutions and preferred embodiments
QMAGTPITPCKDGFT

SEQ ID NO: 1118 - protein, 15 aa, Artificial Sequence
  Description of Artificial Sequence: Synthetic peptide
  N-term H or Acetyl
  MOD_RES (8)..(8): Thr or Phospho-Thr
  MOD_RES (10)..(10): Modified Cys
  See specification as filed for detailed description of substitutions and preferred embodiments
QMAGTPITPCKDGFT

SEQ ID NO: 1119 - protein, 15 aa, Artificial Sequence
  Description of Artificial Sequence: Synthetic peptide
  N-term H or Acetyl
  MOD_RES (8)..(8): Ser or Phospho-Ser
  MOD_RES (10)..(10): Modified Cys
  See specification as filed for detailed description of substitutions and preferred embodiments
DADRSILSPCGSCGP

SEQ ID NO: 1120 - protein, 15 aa, Artificial Sequence
  Description of Artificial Sequence: Synthetic peptide
  N-term H or Acetyl
  MOD_RES (8)..(8): Ser or Phospho-Ser
  MOD_RES (10)..(10): Modified Cys
  See specification as filed for detailed description of substitutions and preferred embodiments
LVEKLPDSPCLAKKA

SEQ ID NO: 1121 - protein, 15 aa, Artificial Sequence
  Description of Artificial Sequence: Synthetic peptide
  N-term H or Acetyl
  MOD_RES (8)..(8): Ser or Phospho-Ser
  MOD_RES (10)..(10): Modified Cys
  See specification as filed for detailed description of substitutions and preferred embodiments
FGESPPLSPCDMDTQ

SEQ ID NO: 1122 - protein, 15 aa, Artificial Sequence
  Description of Artificial Sequence: Synthetic peptide
  N-term H or Acetyl
  MOD_RES (8)..(8): Thr or Phospho-Thr
  MOD_RES (10)..(10): Modified Cys
  See specification as filed for detailed description of substitutions and preferred embodiments
EVPDVTATPCRLLFF

SEQ ID NO: 1123 - protein, 15 aa, Artificial Sequence
  Description of Artificial Sequence: Synthetic peptide
  N-term H or Acetyl
  MOD_RES (8)..(8): Ser or Phospho-Ser
  MOD_RES (10)..(10): Modified Cys
  See specification as filed for detailed description of substitutions and preferred embodiments
SAVNGTSSACTNLEA

SEQ ID NO: 1124 - protein, 15 aa, Artificial Sequence
  Description of Artificial Sequence: Synthetic peptide
  N-term H or Acetyl
  MOD_RES (8)..(8): Ser or Phospho-Ser
  MOD_RES (10)..(10): Modified Cys
  See specification as filed for detailed description of substitutions and preferred embodiments
LGGLRISSDCSSDIE

SEQ ID NO: 1125 - protein, 14 aa, Artificial Sequence
  Description of Artificial Sequence: Synthetic peptide
  N-term H or Acetyl
  MOD_RES (7)..(7): Ser or Phospho-Ser
  MOD_RES (9)..(9): Modified Cys
  See specification as filed for detailed description of substitutions and preferred embodiments
LAGISRSVCVTVAY

SEQ ID NO: 1126 - protein, 15 aa, Artificial Sequence
  Description of Artificial Sequence: Synthetic peptide
  N-term H or Acetyl
  MOD_RES (8)..(8): Ser or Phospho-Ser
  MOD_RES (10)..(10): Modified Cys
  See specification as filed for detailed description of substitutions and preferred embodiments
NPQDSVGSPCSRVGE

SEQ ID NO: 1127 - protein, 15 aa, Artificial Sequence
  Description of Artificial Sequence: Synthetic peptide
  N-term H or Acetyl
  MOD_RES (8)..(8): Thr or Phospho-Thr
  MOD_RES (10)..(10): Modified Cys
  See specification as filed for detailed description of substitutions and preferred embodiments
KDEILPTTPCSEQKG

SEQ ID NO: 1128 - protein, 15 aa, Artificial Sequence
  Description of Artificial Sequence: Synthetic peptide
  N-term H or Acetyl
  MOD_RES (6)..(6): Modified Cys
  MOD_RES (8)..(8): Thr or Phospho-Thr
  See specification as filed for detailed description of substitutions and preferred embodiments
KDEILCTTPISEQKG

SEQ ID NO: 1129 - protein, 15 aa, Artificial Sequence
  Description of Artificial Sequence: Synthetic peptide
  N-term H or Acetyl
  MOD_RES (8)..(8): Ser or Phospho-Ser
  MOD_RES (10)..(10): Modified Cys
  See specification as filed for detailed description of substitutions and preferred embodiments
HQLFRGFSFCAITSD

SEQ ID NO: 1130 - protein, 15 aa, Artificial Sequence
  Description of Artificial Sequence: Synthetic peptide
  N-term H or Acetyl
  MOD_RES (8)..(8): Ser or Phospho-Ser
  MOD_RES (10)..(10): Modified Cys
  See specification as filed for detailed description of substitutions and preferred embodiments
RGGPEPLSPCPVSPL

SEQ ID NO: 1131 - protein, 15 aa, Artificial Sequence
  Description of Artificial Sequence: Synthetic peptide
  N-term H or Acetyl
  MOD_RES (8)..(8): Ser or Phospho-Ser
  MOD_RES (10)..(10): Modified Cys
  See specification as filed for detailed description of substitutions and preferred embodiments
SGDYMPMSPCSVSAP

SEQ ID NO: 1132 - protein, 15 aa, Artificial Sequence
  Description of Artificial Sequence: Synthetic peptide
  N-term H or Acetyl
  MOD_RES (8)..(8): Ser or Phospho-Ser
  MOD_RES (10)..(10): Modified Cys
  See specification as filed for detailed description of substitutions and preferred embodiments
YMPMSPKSVCAPQQI

SEQ ID NO: 1133 - protein, 15 aa, Artificial Sequence
  Description of Artificial Sequence: Synthetic peptide
  N-term H or Acetyl
  MOD_RES (8)..(8): Ser or Phospho-Ser
  MOD_RES (10)..(10): Modified Cys
  See specification as filed for detailed description of substitutions and preferred embodiments
QAATGFGSPCQYSAD

SEQ ID NO: 1134 - protein, 15 aa, Artificial Sequence
  Description of Artificial Sequence: Synthetic peptide
  N-term H or Acetyl
  MOD_RES (8)..(8): Thr or Phospho-Thr
  MOD_RES (10)..(10): Modified Cys
  See specification as filed for detailed description of substitutions and preferred embodiments
SFITPPTTPCLRRHT

SEQ ID NO: 1135 - protein, 15 aa, Artificial Sequence
  Description of Artificial Sequence: Synthetic peptide
  N-term H or Acetyl
  MOD_RES (8)..(8): Thr or Phospho-Thr
  MOD_RES (10)..(10): Modified Cys
  See specification as filed for detailed description of substitutions and preferred embodiments
TKLKPPRTPCPPSRK

SEQ ID NO: 1136 - protein, 14 aa, Artificial Sequence
  Description of Artificial Sequence: Synthetic peptide
  N-term H or Acetyl
  MOD_RES (7)..(7): Ser or Phospho-Ser
  MOD_RES (9)..(9): Modified Cys
  See specification as filed for detailed description of substitutions and preferred embodiments
ESPEKVSPCKICDF

SEQ ID NO: 1137 - protein, 15 aa, Artificial Sequence
  Description of Artificial Sequence: Synthetic peptide
  N-term H or Acetyl
  MOD_RES (8)..(8): Ser or Phospho-Ser
  MOD_RES (10)..(10): Modified Cys
  See specification as filed for detailed description of substitutions and preferred embodiments
GLSGRKSSTCSPTSP

SEQ ID NO: 1138 - protein, 15 aa, Artificial Sequence
  Description of Artificial Sequence: Synthetic peptide
  N-term H or Acetyl
  MOD_RES (8)..(8): Ser or Phospho-Ser
  MOD_RES (10)..(10): Modified Cys
  See specification as filed for detailed description of substitutions and preferred embodiments
PSVNPSISPCHGVAR

SEQ ID NO: 1139 - protein, 15 aa, Artificial Sequence
  Description of Artificial Sequence: Synthetic peptide
  N-term H or Acetyl
  MOD_RES (8)..(8): Thr or Phospho-Thr
  MOD_RES (10)..(10): Modified Cys
  See specification as filed for detailed description of substitutions and preferred embodiments
YKRRYVETPCVHISS

SEQ ID NO: 1140 - protein, 15 aa, Artificial Sequence
  Description of Artificial Sequence: Synthetic peptide
  N-term H or Acetyl
  MOD_RES (8)..(8): Ser or Phospho-Ser
  MOD_RES (10)..(10): Modified Cys
  See specification as filed for detailed description of substitutions and preferred embodiments
NVRVSNGSPCLERMD

SEQ ID NO: 1141 - protein, 15 aa, Artificial Sequence
  Description of Artificial Sequence: Synthetic peptide
  N-term H or Acetyl
  MOD_RES (8)..(8): Thr or Phospho-Thr
  MOD_RES (10)..(10): Modified Cys
  See specification as filed for detailed description of substitutions and preferred embodiments
DDIEQWFTECPGPDE

SEQ ID NO: 1142 - protein, 15 aa, Artificial Sequence
  Description of Artificial Sequence: Synthetic peptide
  N-term H or Acetyl
  MOD_RES (8)..(8): Thr or Phospho-Thr
  MOD_RES (10)..(10): Modified Cys
  See specification as filed for detailed description of substitutions and preferred embodiments
EPPPRPKTPCIFRAL

SEQ ID NO: 1143 - protein, 15 aa, Artificial Sequence
  Description of Artificial Sequence: Synthetic peptide
  N-term H or Acetyl
  MOD_RES (8)..(8): Thr or Phospho-Thr
  MOD_RES (10)..(10): Modified Cys
  See specification as filed for detailed description of substitutions and preferred embodiments
EPPPRPKTPCIFRAL

SEQ ID NO: 1144 - protein, 15 aa, Artificial Sequence
  Description of Artificial Sequence: Synthetic peptide
  N-term H or Acetyl
  MOD_RES (8)..(8): Ser or Phospho-Ser
  MOD_RES (10)..(10): Modified Cys
  See specification as filed for detailed description of substitutions and preferred embodiments
ARVSPPESPCARAAA

SEQ ID NO: 1145 - protein, 15 aa, Artificial Sequence
  Description of Artificial Sequence: Synthetic peptide
  N-term H or Acetyl
  MOD_RES (8)..(8): Ser or Phospho-Ser
  MOD_RES (10)..(10): Modified Cys
  See specification as filed for detailed description of substitutions and preferred embodiments
ARVSPPESPCARAAA

SEQ ID NO: 1146 - protein, 18 aa, Artificial Sequence
  Description of Artificial Sequence: Synthetic peptide
  N-term H or Acetyl
  MOD_RES (11)..(11): Ser or Phospho-Ser
  MOD_RES (13)..(13): Modified Cys
  See specification as filed for detailed description of substitutions and preferred embodiments
KKKLAPNPSFSPCPGFTP

SEQ ID NO: 1147 - protein, 15 aa, Artificial Sequence
  Description of Artificial Sequence: Synthetic peptide
  N-term H or Acetyl
  MOD_RES (8)..(8): Ser or Phospho-Ser
  MOD_RES (10)..(10): Modified Cys
  See specification as filed for detailed description of substitutions and preferred embodiments
EIRSRHSSYCAGTED

SEQ ID NO: 1148 - protein, 15 aa, Artificial Sequence
  Description of Artificial Sequence: Synthetic peptide
  N-term H or Acetyl
  MOD_RES (8)..(8): Thr or Phospho-Thr
  MOD_RES (10)..(10): Modified Cys
  See specification as filed for detailed description of substitutions and preferred embodiments
SRDPVARTSCLQTPA

SEQ ID NO: 1149 - protein, 15 aa, Artificial Sequence
  Description of Artificial Sequence: Synthetic peptide
  N-term H or Acetyl
  MOD_RES (8)..(8): Ser or Phospho-Ser
  MOD_RES (10)..(10): Modified Cys
  See specification as filed for detailed description of substitutions and preferred embodiments
PSWHLADSPCVNGAT

SEQ ID NO: 1150 - protein, 15 aa, Artificial Sequence
  Description of Artificial Sequence: Synthetic peptide
  N-term H or Acetyl
  MOD_RES (8)..(8): Ser or Phospho-Ser
  MOD_RES (10)..(10): Modified Cys
  See specification as filed for detailed description of substitutions and preferred embodiments
PTSPRRYSPCAKDLL

SEQ ID NO: 1151 - protein, 15 aa, Artificial Sequence
  Description of Artificial Sequence: Synthetic peptide
  N-term H or Acetyl
  MOD_RES (8)..(8): Ser or Phospho-Ser
  MOD_RES (10)..(10): Modified Cys
  See specification as filed for detailed description of substitutions and preferred embodiments
IHFWSSLSPCAPLSP

SEQ ID NO: 1152 - protein, 15 aa, Artificial Sequence
  Description of Artificial Sequence: Synthetic peptide
  N-term H or Acetyl
  MOD_RES (8)..(8): Ser or Phospho-Ser
  MOD_RES (10)..(10): Modified Cys
  See specification as filed for detailed description of substitutions and preferred embodiments
LSPVAPLSPCRLQGP

SEQ ID NO: 1153 - protein, 13 aa, Artificial Sequence
  Description of Artificial Sequence: Synthetic peptide
  N-term H or Acetyl
  MOD_RES (6)..(6): Ser or Phospho-Ser
  MOD_RES (8)..(8): Modified Cys
  See specification as filed for detailed description of substitutions and preferred embodiments
PQPLRSPCLDNPT

SEQ ID NO: 1154 - protein, 15 aa, Artificial Sequence
  Description of Artificial Sequence: Synthetic peptide
  N-term H or Acetyl
  MOD_RES (8)..(8): Ser or Phospho-Ser
  MOD_RES (10)..(10): Modified Cys
  See specification as filed for detailed description of substitutions and preferred embodiments
GSASASGSPCDPGFM

SEQ ID NO: 1155 - protein, 13 aa, Artificial Sequence
  Description of Artificial Sequence: Synthetic peptide
  N-term H or Acetyl
  MOD_RES (8)..(8): Thr or Phospho-Thr
  MOD_RES (10)..(10): Modified Cys
  See specification as filed for detailed description of substitutions and preferred embodiments
RTDSLAATPCAAK

SEQ ID NO: 1156 - protein, 15 aa, Artificial Sequence
  Description of Artificial Sequence: Synthetic peptide
  N-term H or Acetyl
  MOD_RES (8)..(8): Ser or Phospho-Ser
  MOD_RES (10)..(10): Modified Cys
  See specification as filed for detailed description of substitutions and preferred embodiments
RRVSGNNSPCLSNGG

SEQ ID NO: 1157 - protein, 15 aa, Artificial Sequence
  Description of Artificial Sequence: Synthetic peptide
  N-term H or Acetyl
  MOD_RES (8)..(8): Ser or Phospho-Ser
  MOD_RES (10)..(10): Modified Cys
  See specification as filed for detailed description of substitutions and preferred embodiments
RPASVNGSPCATSES

SEQ ID NO: 1158 - protein, 15 aa, Artificial Sequence
  Description of Artificial Sequence: Synthetic peptide
  N-term H or Acetyl
  MOD_RES (8)..(8): Thr or Phospho-Thr
  MOD_RES (10)..(10): Modified Cys
  See specification as filed for detailed description of substitutions and preferred embodiments
PSRPPPPTPCRPASV

SEQ ID NO: 1159 - protein, 15 aa, Artificial Sequence
  Description of Artificial Sequence: Synthetic peptide
  N-term H or Acetyl
  MOD_RES (8)..(8): Ser or Phospho-Ser
  MOD_RES (10)..(10): Modified Cys
  See specification as filed for detailed description of substitutions and preferred embodiments
DRVSRSSSPCKTGEQ

SEQ ID NO: 1160 - protein, 14 aa, Artificial Sequence
  Description of Artificial Sequence: Synthetic peptide
  N-term H or Acetyl
  MOD_RES (8)..(8): Thr or Phospho-Thr
  MOD_RES (10)..(10): Modified Cys
  See specification as filed for detailed description of substitutions and preferred embodiments
PLKTGEQTPCHEHI

SEQ ID NO: 1161 - protein, 15 aa, Artificial Sequence
  Description of Artificial Sequence: Synthetic peptide
  N-term H or Acetyl
  MOD_RES (8)..(8): Thr or Phospho-Thr
  MOD_RES (10)..(10): Modified Cys
  See specification as filed for detailed description of substitutions and preferred embodiments
ATEEIYLTPCQRPPD

SEQ ID NO: 1162 - protein, 15 aa, Artificial Sequence
  Description of Artificial Sequence: Synthetic peptide
  N-term H or Acetyl
  MOD_RES (8)..(8): Thr or Phospho-Thr
  MOD_RES (10)..(10): Modified Cys
  See specification as filed for detailed description of substitutions and preferred embodiments
SNGHITTTPCPTQFL

SEQ ID NO: 1163 - protein, 13 aa, Artificial Sequence
  Description of Artificial Sequence: Synthetic peptide
  N-term H or Acetyl
  MOD_RES (8)..(8): Thr or Phospho-Thr
  MOD_RES (10)..(10): Modified Cys
  See specification as filed for detailed description of substitutions and preferred embodiments
GHITTTPTPCQFL

SEQ ID NO: 1164 - protein, 18 aa, Artificial Sequence
  Description of Artificial Sequence: Synthetic peptide
  N-term H or Acetyl
  MOD_RES (11)..(11): Thr or Phospho-Thr
  MOD_RES (13)..(13): Modified Cys
  See specification as filed for detailed description of substitutions and preferred embodiments
KKKSNGLVTTTPCSSQFL

SEQ ID NO: 1165 - protein, 15 aa, Artificial Sequence
  Description of Artificial Sequence: Synthetic peptide
  N-term H or Acetyl
  MOD_RES (8)..(8): Thr or Phospho-Thr
  MOD_RES (10)..(10): Modified Cys
  See specification as filed for detailed description of substitutions and preferred embodiments
PSAPALSTPCIRDSA

SEQ ID NO: 1166 - protein, 15 aa, Artificial Sequence
  Description of Artificial Sequence: Synthetic peptide
  N-term H or Acetyl
  MOD_RES (6)..(6): Modified Cys
  MOD_RES (8)..(8): Ser or Phospho-Ser
  See specification as filed for detailed description of substitutions and preferred embodiments
SIMQQCDSPHVVKYY

SEQ ID NO: 1167 - protein, 15 aa, Artificial Sequence
  Description of Artificial Sequence: Synthetic peptide
  N-term H or Acetyl
  MOD_RES (8)..(8): Thr or Phospho-Thr
  MOD_RES (10)..(10): Modified Cys
  See specification as filed for detailed description of substitutions and preferred embodiments
EYSLPALTPCLDEVK

SEQ ID NO: 1168 - protein, 15 aa, Artificial Sequence
  Description of Artificial Sequence: Synthetic peptide
  N-term H or Acetyl
  MOD_RES (8)..(8): Ser or Phospho-Ser
  MOD_RES (10)..(10): Modified Cys
  See specification as filed for detailed description of substitutions and preferred embodiments
RGSMAAPSLCPSLGP

SEQ ID NO: 1169 - protein, 14 aa, Artificial Sequence
  Description of Artificial Sequence: Synthetic peptide
  N-term H or Acetyl
  MOD_RES (6)..(6): Modified Cys
  MOD_RES (8)..(8): Thr or Phospho-Thr
  See specification as filed for detailed description of substitutions and preferred embodiments
KRKLPCDTPGQGLT

SEQ ID NO: 1170 - protein, 15 aa, Artificial Sequence
  Description of Artificial Sequence: Synthetic peptide
  N-term H or Acetyl
  MOD_RES (8)..(8): Ser or Phospho-Ser
  MOD_RES (10)..(10): Modified Cys
  See specification as filed for detailed description of substitutions and preferred embodiments
PRTSPIMSPCTSLAE

SEQ ID NO: 1171 - protein, 11 aa, Artificial Sequence
  Description of Artificial Sequence: Synthetic peptide
  N-term H or Acetyl
  MOD_RES (8)..(8): Ser or Phospho-Ser
  MOD_RES (10)..(10): Modified Cys
  See specification as filed for detailed description of substitutions and preferred embodiments
GKKATQASQCY

SEQ ID NO: 1172 - protein, 15 aa, Artificial Sequence
  Description of Artificial Sequence: Synthetic peptide
  N-term H or Acetyl
  MOD_RES (8)..(8): Ser or Phospho-Ser
  MOD_RES (10)..(10): Modified Cys
  See specification as filed for detailed description of substitutions and preferred embodiments
NSKYNAESTCRESQD

SEQ ID NO: 1173 - protein, 15 aa, Artificial Sequence
  Description of Artificial Sequence: Synthetic peptide
  N-term H or Acetyl
  MOD_RES (7)..(7): Ser or Phospho-Ser
  MOD_RES (9)..(9): Modified Cys
  See specification as filed for detailed description of substitutions and preferred embodiments
SKYNAESTCRESQDT

SEQ ID NO: 1174 - protein, 15 aa, Artificial Sequence
  Description of Artificial Sequence: Synthetic peptide
  N-term H or Acetyl
  MOD_RES (8)..(8): Ser or Phospho-Ser
  MOD_RES (10)..(10): Modified Cys
  See specification as filed for detailed description of substitutions and preferred embodiments
SGYSSPGSPCTPGSR

SEQ ID NO: 1175 - protein, 15 aa, Artificial Sequence
  Description of Artificial Sequence: Synthetic peptide
  N-term H or Acetyl
  MOD_RES (8)..(8): Thr or Phospho-Thr
  MOD_RES (10)..(10): Modified Cys
  See specification as filed for detailed description of substitutions and preferred embodiments
GQSSAAATPCTTGTK

SEQ ID NO: 1176 - protein, 15 aa, Artificial Sequence
  Description of Artificial Sequence: Synthetic peptide
  N-term H or Acetyl
  MOD_RES (8)..(8): Thr or Phospho-Thr
  MOD_RES (10)..(10): Modified Cys
  See specification as filed for detailed description of substitutions and preferred embodiments
TTGTKSNTPCSSVPS

SEQ ID NO: 1177 - protein, 15 aa, Artificial Sequence
  Description of Artificial Sequence: Synthetic peptide
  N-term H or Acetyl
  MOD_RES (6)..(6): Modified Cys
  MOD_RES (8)..(8): Thr or Phospho-Thr
  See specification as filed for detailed description of substitutions and preferred embodiments
TTGTKCNTPTSSVPS

SEQ ID NO: 1178 - protein, 15 aa, Artificial Sequence
  Description of Artificial Sequence: Synthetic peptide
  N-term H or Acetyl
  MOD_RES (8)..(8): Thr or Phospho-Thr
  MOD_RES (10)..(10): Modified Cys
  See specification as filed for detailed description of substitutions and preferred embodiments
SVPSAAVTPCNESLQ

SEQ ID NO: 1179 - protein, 15 aa, Artificial Sequence
  Description of Artificial Sequence: Synthetic peptide
  N-term H or Acetyl
  MOD_RES (8)..(8): Ser or Phospho-Ser
  MOD_RES (10)..(10): Modified Cys
  See specification as filed for detailed description of substitutions and preferred embodiments
SNTGQAISPCMKRRI

SEQ ID NO: 1180 - protein, 15 aa, Artificial Sequence
  Description of Artificial Sequence: Synthetic peptide
  N-term H or Acetyl
  MOD_RES (6)..(6): Modified Cys
  MOD_RES (8)..(8): Ser or Phospho-Ser
  See specification as filed for detailed description of substitutions and preferred embodiments
SNTGQCISPGMKRRI

SEQ ID NO: 1181 - protein, 15 aa, Artificial Sequence
  Description of Artificial Sequence: Synthetic peptide
  N-term H or Acetyl
  MOD_RES (8)..(8): Thr or Phospho-Thr
  MOD_RES (10)..(10): Modified Cys
  See specification as filed for detailed description of substitutions and preferred embodiments
QSMVVPQTPCHTARV

SEQ ID NO: 1182 - protein, 15 aa, Artificial Sequence
  Description of Artificial Sequence: Synthetic peptide
  N-term H or Acetyl
  MOD_RES (6)..(6): Modified Cys
  MOD_RES (8)..(8): Thr or Phospho-Thr
  See specification as filed for detailed description of substitutions and preferred embodiments
QSMVVCQTPLHTARV

SEQ ID NO: 1183 - protein, 15 aa, Artificial Sequence
  Description of Artificial Sequence: Synthetic peptide
  N-term H or Acetyl
  MOD_RES (8)..(8): Ser or Phospho-Ser
  MOD_RES (10)..(10): Modified Cys
  See specification as filed for detailed description of substitutions and preferred embodiments
TTLHRNVSPCAPQRP

SEQ ID NO: 1184 - protein, 15 aa, Artificial Sequence
  Description of Artificial Sequence: Synthetic peptide
  N-term H or Acetyl
  MOD_RES (6)..(6): Modified Cys
  MOD_RES (8)..(8): Ser or Phospho-Ser
  See specification as filed for detailed description of substitutions and preferred embodiments
TTLHRCVSPGAPQRP

SEQ ID NO: 1185 - protein, 15 aa, Artificial Sequence
  Description of Artificial Sequence: Synthetic peptide
  N-term H or Acetyl
  MOD_RES (8)..(8): Ser or Phospho-Ser
  MOD_RES (10)..(10): Modified Cys
  See specification as filed for detailed description of substitutions and preferred embodiments
SIKSEPISPCRDRMT

SEQ ID NO: 1186 - protein, 15 aa, Artificial Sequence
  Description of Artificial Sequence: Synthetic peptide
  N-term H or Acetyl
  MOD_RES (6)..(6): Modified Cys
  MOD_RES (8)..(8): Ser or Phospho-Ser
  See specification as filed for detailed description of substitutions and preferred embodiments
SIKSECISPPRDRMT

SEQ ID NO: 1187 - protein, 15 aa, Artificial Sequence
  Description of Artificial Sequence: Synthetic peptide
  N-term H or Acetyl
  MOD_RES (8)..(8): Ser or Phospho-Ser
  MOD_RES (10)..(10): Modified Cys
  See specification as filed for detailed description of substitutions and preferred embodiments
DPRGDFHSPCVLGRP

SEQ ID NO: 1188 - protein, 15 aa, Artificial Sequence
  Description of Artificial Sequence: Synthetic peptide
  N-term H or Acetyl
  MOD_RES (6)..(6): Modified Cys
  MOD_RES (8)..(8): Ser or Phospho-Ser
  See specification as filed for detailed description of substitutions and preferred embodiments
DPRGDCHSPIVLGRP

SEQ ID NO: 1189 - protein, 15 aa, Artificial Sequence
  Description of Artificial Sequence: Synthetic peptide
  N-term H or Acetyl
  MOD_RES (8)..(8): Ser or Phospho-Ser
  MOD_RES (10)..(10): Modified Cys
  See specification as filed for detailed description of substitutions and preferred embodiments
PNTEDRESPCVKRMR

SEQ ID NO: 1190 - protein, 15 aa, Artificial Sequence
  Description of Artificial Sequence: Synthetic peptide
  N-term H or Acetyl
  MOD_RES (6)..(6): Modified Cys
  MOD_RES (8)..(8): Ser or Phospho-Ser
  See specification as filed for detailed description of substitutions and preferred embodiments
PNTEDCESPSVKRMR

SEQ ID NO: 1191 - protein, 15 aa, Artificial Sequence
  Description of Artificial Sequence: Synthetic peptide
  N-term H or Acetyl
  MOD_RES (6)..(6): Modified Cys
  MOD_RES (8)..(8): Ser or Phospho-Ser
  See specification as filed for detailed description of substitutions and preferred embodiments
KEHRGCDSPDPDTSY

SEQ ID NO: 1192 - protein, 15 aa, Artificial Sequence
  Description of Artificial Sequence: Synthetic peptide
  N-term H or Acetyl
  MOD_RES (8)..(8): Thr or Phospho-Thr
  MOD_RES (10)..(10): Modified Cys
  See specification as filed for detailed description of substitutions and preferred embodiments
PDTSYVLTPCTEEKY

SEQ ID NO: 1193 - protein, 15 aa, Artificial Sequence
  Description of Artificial Sequence: Synthetic peptide
  N-term H or Acetyl
  MOD_RES (6)..(6): Modified Cys
  MOD_RES (8)..(8): Thr or Phospho-Thr
  See specification as filed for detailed description of substitutions and preferred embodiments
PDTSYCLTPHTEEKY

SEQ ID NO: 1194 - protein, 15 aa, Artificial Sequence
  Description of Artificial Sequence: Synthetic peptide
  N-term H or Acetyl
  MOD_RES (6)..(6): Modified Cys
  MOD_RES (8)..(8): Thr or Phospho-Thr
  See specification as filed for detailed description of substitutions and preferred embodiments
SAKSRCQTAPVPMPD

SEQ ID NO: 1195 - protein, 15 aa, Artificial Sequence
  Description of Artificial Sequence: Synthetic peptide
  N-term H or Acetyl
  MOD_RES (6)..(6): Modified Cys
  MOD_RES (8)..(8): Thr or Phospho-Thr
  See specification as filed for detailed description of substitutions and preferred embodiments
SAKSRCQTAPVPMPD

SEQ ID NO: 1196 - protein, 15 aa, Artificial Sequence
  Description of Artificial Sequence: Synthetic peptide
  N-term H or Acetyl
  MOD_RES (6)..(6): Modified Cys
  MOD_RES (8)..(8): Ser or Phospho-Ser
  See specification as filed for detailed description of substitutions and preferred embodiments
STSVTCHSPSSPVGS

SEQ ID NO: 1197 - protein, 15 aa, Artificial Sequence
  Description of Artificial Sequence: Synthetic peptide
  N-term H or Acetyl
  MOD_RES (8)..(8): Ser or Phospho-Ser
  MOD_RES (10)..(10): Modified Cys
  See specification as filed for detailed description of substitutions and preferred embodiments
KMEVEELSPCALGRF

SEQ ID NO: 1198 - protein, 15 aa, Artificial Sequence
  Description of Artificial Sequence: Synthetic peptide
  N-term H or Acetyl
  MOD_RES (1)..(1): Ser or Phospho-Ser
  MOD_RES (3)..(3): Modified Cys
  See specification as filed for detailed description of substitutions and preferred embodiments
STCSEPLSPTSSLGE

SEQ ID NO: 1199 - protein, 15 aa, Artificial Sequence
  Description of Artificial Sequence: Synthetic peptide
  N-term H or Acetyl
  MOD_RES (8)..(8): Ser or Phospho-Ser
  MOD_RES (10)..(10): Modified Cys
  See specification as filed for detailed description of substitutions and preferred embodiments
GVRRRRLSNCSLTGV

SEQ ID NO: 1200 - protein, 15 aa, Artificial Sequence
  Description of Artificial Sequence: Synthetic peptide
  N-term H or Acetyl
  MOD_RES (6)..(6): Modified Cys
  MOD_RES (8)..(8): Ser or Phospho-Ser
  See specification as filed for detailed description of substitutions and preferred embodiments
GVRRRCLSNVSLTGV

SEQ ID NO: 1201 - protein, 15 aa, Artificial Sequence
  Description of Artificial Sequence: Synthetic peptide
  N-term H or Acetyl
  MOD_RES (8)..(8): Ser or Phospho-Ser
  MOD_RES (10)..(10): Modified Cys
  See specification as filed for detailed description of substitutions and preferred embodiments
RRRLSNVSLCGVSTI

SEQ ID NO: 1202 - protein, 15 aa, Artificial Sequence
  Description of Artificial Sequence: Synthetic peptide
  N-term H or Acetyl
  MOD_RES (6)..(6): Modified Cys
  MOD_RES (8)..(8): Ser or Phospho-Ser
  See specification as filed for detailed description of substitutions and preferred embodiments
RRRLSCVSLTGVSTI

SEQ ID NO: 1203 - protein, 15 aa, Artificial Sequence
  Description of Artificial Sequence: Synthetic peptide
  N-term H or Acetyl
  MOD_RES (8)..(8): Ser or Phospho-Ser
  MOD_RES (10)..(10): Modified Cys
  See specification as filed for detailed description of substitutions and preferred embodiments
GREKRSNSQCYIGRP

SEQ ID NO: 1204 - protein, 15 aa, Artificial Sequence
  Description of Artificial Sequence: Synthetic peptide
  N-term H or Acetyl
  MOD_RES (6)..(6): Modified Cys
  MOD_RES (8)..(8): Ser or Phospho-Ser
  See specification as filed for detailed description of substitutions and preferred embodiments
GREKRCNSQSYIGRP

SEQ ID NO: 1205 - protein, 15 aa, Artificial Sequence
  Description of Artificial Sequence: Synthetic peptide
  N-term H or Acetyl
  MOD_RES (8)..(8): Ser or Phospho-Ser
  MOD_RES (10)..(10): Modified Cys
  See specification as filed for detailed description of substitutions and preferred embodiments
EDANRTISPCTSNNI

SEQ ID NO: 1206 - protein, 15 aa, Artificial Sequence
  Description of Artificial Sequence: Synthetic peptide
  N-term H or Acetyl
  MOD_RES (10)..(10): Modified Cys
  MOD_RES (12)..(12): Ser or Phospho-Ser
  See specification as filed for detailed description of substitutions and preferred embodiments
EDANRTISPCTSNNI

SEQ ID NO: 1207 - protein, 15 aa, Artificial Sequence
  Description of Artificial Sequence: Synthetic peptide
  N-term H or Acetyl
  MOD_RES (8)..(8): Ser or Phospho-Ser
  MOD_RES (10)..(10): Modified Cys
  See specification as filed for detailed description of substitutions and preferred embodiments
RTISPSTSNCIPLMR

SEQ ID NO: 1208 - protein, 15 aa, Artificial Sequence
  Description of Artificial Sequence: Synthetic peptide
  N-term H or Acetyl
  MOD_RES (6)..(6): Modified Cys
  MOD_RES (8)..(8): Ser or Phospho-Ser
  See specification as filed for detailed description of substitutions and preferred embodiments
RTISPCTSNNIPLMR

SEQ ID NO: 1209 - protein, 15 aa, Artificial Sequence
  Description of Artificial Sequence: Synthetic peptide
  N-term H or Acetyl
  MOD_RES (8)..(8): Ser or Phospho-Ser
  MOD_RES (10)..(10): Modified Cys
  See specification as filed for detailed description of substitutions and preferred embodiments
GEKSFRRSVCGTPAY

SEQ ID NO: 1210 - protein, 15 aa, Artificial Sequence
  Description of Artificial Sequence: Synthetic peptide
  N-term H or Acetyl
  MOD_RES (6)..(6): Modified Cys
  MOD_RES (8)..(8): Ser or Phospho-Ser
  See specification as filed for detailed description of substitutions and preferred embodiments
GEKSFCRSVVGTPAY

SEQ ID NO: 1211 - protein, 15 aa, Artificial Sequence
  Description of Artificial Sequence: Synthetic peptide
  N-term H or Acetyl
  MOD_RES (8)..(8): Ser or Phospho-Ser
  MOD_RES (10)..(10): Modified Cys
  See specification as filed for detailed description of substitutions and preferred embodiments
EPGPVPSSPCQEPPT

SEQ ID NO: 1212 - protein, 15 aa, Artificial Sequence
  Description of Artificial Sequence: Synthetic peptide
  N-term H or Acetyl
  MOD_RES (8)..(8): Ser or Phospho-Ser
  MOD_RES (10)..(10): Modified Cys
  See specification as filed for detailed description of substitutions and preferred embodiments
PLQRQPSSPCPTPRN

SEQ ID NO: 1213 - protein, 15 aa, Artificial Sequence
  Description of Artificial Sequence: Synthetic peptide
  N-term H or Acetyl
  MOD_RES (8)..(8): Ser or Phospho-Ser
  MOD_RES (10)..(10): Modified Cys
  See specification as filed for detailed description of substitutions and preferred embodiments
YSHKGHLSECLVTKW

SEQ ID NO: 1214 - protein, 15 aa, Artificial Sequence
  Description of Artificial Sequence: Synthetic peptide
  N-term H or Acetyl
  MOD_RES (8)..(8): Ser or Phospho-Ser
  MOD_RES (10)..(10): Modified Cys
  See specification as filed for detailed description of substitutions and preferred embodiments
PPYNRAVSLCSPVSV

SEQ ID NO: 1215 - protein, 14 aa, Artificial Sequence
  Description of Artificial Sequence: Synthetic peptide
  N-term H or Acetyl
  MOD_RES (7)..(7): Ser or Phospho-Ser
  MOD_RES (9)..(9): Modified Cys
  See specification as filed for detailed description of substitutions and preferred embodiments
PDVEMPSPCAPSGD

SEQ ID NO: 1216 - protein, 15 aa, Artificial Sequence
  Description of Artificial Sequence: Synthetic peptide
  N-term H or Acetyl
  MOD_RES (6)..(6): Modified Cys
  MOD_RES (8)..(8): Ser or Phospho-Ser
  See specification as filed for detailed description of substitutions and preferred embodiments
SRLRDCPSAPLEAPE

SEQ ID NO: 1217 - protein, 15 aa, Artificial Sequence
  Description of Artificial Sequence: Synthetic peptide
  N-term H or Acetyl
  MOD_RES (6)..(6): Modified Cys
  MOD_RES (8)..(8): Ser or Phospho-Ser
  See specification as filed for detailed description of substitutions and preferred embodiments
DPLPPCFSGTPKGSG

SEQ ID NO: 1218 - protein, 15 aa, Artificial Sequence
  Description of Artificial Sequence: Synthetic peptide
  N-term H or Acetyl
  MOD_RES (8)..(8): Thr or Phospho-Thr
  MOD_RES (10)..(10): Modified Cys
  See specification as filed for detailed description of substitutions and preferred embodiments
VKAEPAHTACSVAAK

SEQ ID NO: 1219 - protein, 15 aa, Artificial Sequence
  Description of Artificial Sequence: Synthetic peptide
  N-term H or Acetyl
  MOD_RES (8)..(8): Ser or Phospho-Ser
  MOD_RES (10)..(10): Modified Cys
  See specification as filed for detailed description of substitutions and preferred embodiments
DSLSYYHSPCDSFSS

SEQ ID NO: 1220 - protein, 15 aa, Artificial Sequence
  Description of Artificial Sequence: Synthetic peptide
  N-term H or Acetyl
  MOD_RES (8)..(8): Ser or Phospho-Ser
  MOD_RES (10)..(10): Modified Cys
  See specification as filed for detailed description of substitutions and preferred embodiments
SALQGFNSPCMLSLG

SEQ ID NO: 1221 - protein, 15 aa, Artificial Sequence
  Description of Artificial Sequence: Synthetic peptide
  N-term H or Acetyl
  MOD_RES (8)..(8): Ser or Phospho-Ser
  MOD_RES (10)..(10): Modified Cys
  See specification as filed for detailed description of substitutions and preferred embodiments
LTDPRLLSPCQPALQ

SEQ ID NO: 1222 - protein, 15 aa, Artificial Sequence
  Description of Artificial Sequence: Synthetic peptide
  N-term H or Acetyl
  MOD_RES (6)..(6): Modified Cys
  MOD_RES (8)..(8): Ser or Phospho-Ser
  See specification as filed for detailed description of substitutions and preferred embodiments
VNTRACPSQHSSPAV

SEQ ID NO: 1223 - protein, 15 aa, Artificial Sequence
  Description of Artificial Sequence: Synthetic peptide
  N-term H or Acetyl
  MOD_RES (8)..(8): Ser or Phospho-Ser
  MOD_RES (10)..(10): Modified Cys
  See specification as filed for detailed description of substitutions and preferred embodiments
QHSSPAVSDCLPSNS

SEQ ID NO: 1224 - protein, 15 aa, Artificial Sequence
  Description of Artificial Sequence: Synthetic peptide
  N-term H or Acetyl
  MOD_RES (8)..(8): Ser or Phospho-Ser
  MOD_RES (10)..(10): Modified Cys
  See specification as filed for detailed description of substitutions and preferred embodiments
AVSDSLPSNCLKKSS

SEQ ID NO: 1225 - protein, 15 aa, Artificial Sequence
  Description of Artificial Sequence: Synthetic peptide
  N-term H or Acetyl
  MOD_RES (8)..(8): Ser or Phospho-Ser
  MOD_RES (10)..(10): Modified Cys
  See specification as filed for detailed description of substitutions and preferred embodiments
SNSLKKSSACLKKIL

SEQ ID NO: 1226 - protein, 13 aa, Artificial Sequence
  Description of Artificial Sequence: Synthetic peptide
  N-term H or Acetyl
  MOD_RES (6)..(6): Ser or Phospho-Ser
  MOD_RES (8)..(8): Modified Cys
  See specification as filed for detailed description of substitutions and preferred embodiments
LPGPPSPCSDAES

SEQ ID NO: 1227 - protein, 15 aa, Artificial Sequence
  Description of Artificial Sequence: Synthetic peptide
  N-term H or Acetyl
  MOD_RES (8)..(8): Ser or Phospho-Ser
  MOD_RES (10)..(10): Modified Cys
  See specification as filed for detailed description of substitutions and preferred embodiments
SPLSDPSSPCASEDF

SEQ ID NO: 1228 - protein, 15 aa, Artificial Sequence
  Description of Artificial Sequence: Synthetic peptide
  N-term H or Acetyl
  MOD_RES (8)..(8): Ser or Phospho-Ser
  MOD_RES (10)..(10): Modified Cys
  See specification as filed for detailed description of substitutions and preferred embodiments
ANPSPPPSPCQQINL

SEQ ID NO: 1229 - protein, 15 aa, Artificial Sequence
  Description of Artificial Sequence: Synthetic peptide
  N-term H or Acetyl
  MOD_RES (6)..(6): Modified Cys
  MOD_RES (8)..(8): Ser or Phospho-Ser
  See specification as filed for detailed description of substitutions and preferred embodiments
AHEGVCLSVPEYRSR

SEQ ID NO: 1230 - protein, 15 aa, Artificial Sequence
  Description of Artificial Sequence: Synthetic peptide
  N-term H or Acetyl
  MOD_RES (8)..(8): Ser or Phospho-Ser
  MOD_RES (10)..(10): Modified Cys
  See specification as filed for detailed description of substitutions and preferred embodiments
EKGPEGVSPCQAHLH

SEQ ID NO: 1231 - protein, 15 aa, Artificial Sequence
  Description of Artificial Sequence: Synthetic peptide
  N-term H or Acetyl
  MOD_RES (8)..(8): Thr or Phospho-Thr
  MOD_RES (10)..(10): Modified Cys
  See specification as filed for detailed description of substitutions and preferred embodiments
GPEDQAVTECVATRW

SEQ ID NO: 1232 - protein, 13 aa, Artificial Sequence
  Description of Artificial Sequence: Synthetic peptide
  N-term H or Acetyl
  MOD_RES (6)..(6): Thr or Phospho-Thr
  MOD_RES (8)..(8): Modified Cys
  See specification as filed for detailed description of substitutions and preferred embodiments
GGSSGTSCEKGPE

SEQ ID NO: 1233 - protein, 15 aa, Artificial Sequence
  Description of Artificial Sequence: Synthetic peptide
  N-term H or Acetyl
  MOD_RES (8)..(8): Thr or Phospho-Thr
  MOD_RES (10)..(10): Modified Cys
  See specification as filed for detailed description of substitutions and preferred embodiments
DPQLPSRTPCQGPRP

SEQ ID NO: 1234 - protein, 15 aa, Artificial Sequence
  Description of Artificial Sequence: Synthetic peptide
  N-term H or Acetyl
  MOD_RES (6)..(6): Modified Cys
  MOD_RES (8)..(8): Ser or Phospho-Ser
  See specification as filed for detailed description of substitutions and preferred embodiments
APEVLCSSHRYTLGV

SEQ ID NO: 1235 - protein, 15 aa, Artificial Sequence
  Description of Artificial Sequence: Synthetic peptide
  N-term H or Acetyl
  MOD_RES (6)..(6): Modified Cys
  MOD_RES (8)..(8): Ser or Phospho-Ser
  See specification as filed for detailed description of substitutions and preferred embodiments
RADPQCPSRTPVQGP

SEQ ID NO: 1236 - protein, 23 aa, Artificial Sequence
  Description of Artificial Sequence: Synthetic peptide
  N-term H or Acetyl
  MOD_RES (19)..(19): Ser or Phospho-Ser
  MOD_RES (21)..(21): Modified Cys
  See specification as filed for detailed description of substitutions and preferred embodiments
SSKRAKAKTTKKRPQRATSNCFS

SEQ ID NO: 1237 - protein, 18 aa, Artificial Sequence
  Description of Artificial Sequence: Synthetic peptide
  N-term H or Acetyl
  MOD_RES (14)..(14): Ser or Phospho-Ser
  MOD_RES (16)..(16): Modified Cys
  See specification as filed for detailed description of substitutions and preferred embodiments
KAKTTKKRPQRATSNCFS

SEQ ID NO: 1238 - protein, 16 aa, Artificial Sequence
  Description of Artificial Sequence: Synthetic peptide
  N-term H or Acetyl
  MOD_RES (12)..(12): Ser or Phospho-Ser
  MOD_RES (14)..(14): Modified Cys
  See specification as filed for detailed description of substitutions and preferred embodiments
KTTKKRPQRATSNCFS

SEQ ID NO: 1239 - protein, 14 aa, Artificial Sequence
  Description of Artificial Sequence: Synthetic peptide
  N-term H or Acetyl
  MOD_RES (9)..(9): Ser or Phospho-Ser
  MOD_RES (11)..(11): Modified Cys
  See specification as filed for detailed description of substitutions and preferred embodiments
KKRPQRATSNCFAM

SEQ ID NO: 1240 - protein, 12 aa, Artificial Sequence
  Description of Artificial Sequence: Synthetic peptide
  N-term H or Acetyl
  MOD_RES (5)..(5): Ser or Phospho-Ser
  MOD_RES (7)..(7): Modified Cys
  See specification as filed for detailed description of substitutions and preferred embodiments
QETFSDCWKLLP

SEQ ID NO: 1241 - protein, 12 aa, Artificial Sequence
  Description of Artificial Sequence: Synthetic peptide
  N-term H or Acetyl
  MOD_RES (3)..(3): Modified Cys
  MOD_RES (5)..(5): Ser or Phospho-Ser
  See specification as filed for detailed description of substitutions and preferred embodiments
QECFSDLWKLLP

SEQ ID NO: 1242 - protein, 26 aa, Artificial Sequence
  Description of Artificial Sequence: Synthetic peptide
  N-term H or Acetyl
  MOD_RES (12)..(12): Modified Cys
  MOD_RES (14)..(14): Ser or Phospho-Ser
  See specification as filed for detailed description of substitutions and preferred embodiments
GYAKDVDQGSLCTSFVGTLQYLAKKK

SEQ ID NO: 1243 - protein, 26 aa, Artificial Sequence
  Description of Artificial Sequence: Synthetic peptide
  N-term H or Acetyl
  MOD_RES (10)..(10): Ser or Phospho-Ser
  MOD_RES (12)..(12): Modified Cys
  See specification as filed for detailed description of substitutions and preferred embodiments
GYAKDVDQGSLCTSFVGTLQYLAKKK

SEQ ID NO: 1244 - protein, 10 aa, Artificial Sequence
  Description of Artificial Sequence: Synthetic peptide
  N-term H or Acetyl
  MOD_RES (2)..(2): Modified Cys
  MOD_RES (4)..(4): Ser or Phospho-Ser
  See specification as filed for detailed description of substitutions and preferred embodiments
RCFSLRRKAK

SEQ ID NO: 1245 - protein, 11 aa, Artificial Sequence
  Description of Artificial Sequence: Synthetic peptide
  N-term H or Acetyl
  MOD_RES (2)..(2): Modified Cys
  See specification as filed for detailed description of substitutions and preferred embodiments
ACKTPKKAKKP

SEQ ID NO: 1246 - protein, 16 aa, Artificial Sequence
  Description of Artificial Sequence: Synthetic peptide
  N-term H or Acetyl
  MOD_RES (2)..(2): Modified Cys
  MOD_RES (4)..(4): Ser or Phospho-Ser
  See specification as filed for detailed description of substitutions and preferred embodiments
ICTSPITTTYFFFKKK

SEQ ID NO: 1247 - protein, 13 aa, Artificial Sequence
  Description of Artificial Sequence: Synthetic peptide
  N-term H or Acetyl
  MOD_RES (3)..(3): Modified Cys
  MOD_RES (5)..(5): Ser or Phospho-Ser
  See specification as filed for detailed description of substitutions and preferred embodiments
WDCDSDDDDDAAA

SEQ ID NO: 1248 - protein, 16 aa, Artificial Sequence
  Description of Artificial Sequence: Synthetic peptide
  N-term H or Acetyl
  MOD_RES (3)..(3): Modified Cys
  MOD_RES (5)..(5): Ser or Phospho-Ser
  See specification as filed for detailed description of substitutions and preferred embodiments
WDCDSDDDDDAAAKKK

SEQ ID NO: 1249 - protein, 22 aa, Artificial Sequence
  Description of Artificial Sequence: Synthetic peptide
  N-term H or Acetyl
  MOD_RES (6)..(6): Modified Cys
  MOD_RES (8)..(8): Ser or Phospho-Ser
  See specification as filed for detailed description of substitutions and preferred embodiments
VSGQLCDSMANSFVGTRSYKKK

SEQ ID NO: 1250 - protein, 22 aa, Artificial Sequence
  Description of Artificial Sequence: Synthetic peptide
  N-term H or Acetyl
  MOD_RES (13)..(13): Modified Cys
  MOD_RES (15)..(15): Ser or Phospho-Ser
  See specification as filed for detailed description of substitutions and preferred embodiments
KKKVSGQLIDSMCNSFVGTRSY

SEQ ID NO: 1251 - protein, 22 aa, Artificial Sequence
  Description of Artificial Sequence: Synthetic peptide
  N-term H or Acetyl
  MOD_RES (11)..(11): Ser or Phospho-Ser
  MOD_RES (13)..(13): Modified Cys
  See specification as filed for detailed description of substitutions and preferred embodiments
KKKVSGQLIDSMCNSFVGTRSY

SEQ ID NO: 1252 - protein, 22 aa, Artificial Sequence
  Description of Artificial Sequence: Synthetic peptide
  N-term H or Acetyl
  MOD_RES (17)..(17): Modified Cys
  MOD_RES (19)..(19): Thr or Phospho-Thr
  See specification as filed for detailed description of substitutions and preferred embodiments
KKKVSGQLIDSMANSFCGTRSY

SEQ ID NO: 1253 - protein, 22 aa, Artificial Sequence
  Description of Artificial Sequence: Synthetic peptide
  N-term H or Acetyl
  MOD_RES (15)..(15): Ser or Phospho-Ser
  MOD_RES (17)..(17): Modified Cys
  See specification as filed for detailed description of substitutions and preferred embodiments
KKKVSGQLIDSMANSFCGTRSY

SEQ ID NO: 1254 - protein, 20 aa, Artificial Sequence
  Description of Artificial Sequence: Synthetic peptide
  N-term H or Acetyl
  MOD_RES (10)..(10): Thr or Phospho-Thr
  MOD_RES (12)..(12): Modified Cys
  See specification as filed for detailed description of substitutions and preferred embodiments
QYHFVASSSTICRDRQRPYS

SEQ ID NO: 1255 - protein, 20 aa, Artificial Sequence
  Description of Artificial Sequence: Synthetic peptide
  N-term H or Acetyl
  MOD_RES (8)..(8): Modified Cys
  MOD_RES (10)..(10): Thr or Phospho-Thr
  See specification as filed for detailed description of substitutions and preferred embodiments
QYHFVASCSTIERDRQRPYS

SEQ ID NO: 1256 - protein, 20 aa, Artificial Sequence
  Description of Artificial Sequence: Synthetic peptide
  N-term H or Acetyl
  MOD_RES (10)..(10): Thr or Phospho-Thr
  MOD_RES (12)..(12): Modified Cys
  See specification as filed for detailed description of substitutions and preferred embodiments
DANPLMANGTLCRRHQNGRF

SEQ ID NO: 1257 - protein, 20 aa, Artificial Sequence
  Description of Artificial Sequence: Synthetic peptide
  N-term H or Acetyl
  MOD_RES (8)..(8): Modified Cys
  MOD_RES (10)..(10): Thr or Phospho-Thr
  See specification as filed for detailed description of substitutions and preferred embodiments
DANPLMACGTLTRRHQNGRF

SEQ ID NO: 1258 - protein, 20 aa, Artificial Sequence
  Description of Artificial Sequence: Synthetic peptide
  N-term H or Acetyl
  MOD_RES (7)..(7): Modified Cys
  MOD_RES (10)..(10): Thr or Phospho-Thr
  See specification as filed for detailed description of substitutions and preferred embodiments
DANPLMCNGTLTRRHQNGRF

SEQ ID NO: 1259 - protein, 20 aa, Artificial Sequence
  Description of Artificial Sequence: Synthetic peptide
  N-term H or Acetyl
  MOD_RES (8)..(8): Modified Cys
  MOD_RES (10)..(10): Thr or Phospho-Thr
  See specification as filed for detailed description of substitutions and preferred embodiments
DANPLMACGTLARRHQNGRF

SEQ ID NO: 1260 - protein, 20 aa, Artificial Sequence
  Description of Artificial Sequence: Synthetic peptide
  N-term H or Acetyl
  MOD_RES (7)..(7): Modified Cys
  MOD_RES (10)..(10): Thr or Phospho-Thr
  See specification as filed for detailed description of substitutions and preferred embodiments
DANPLMCNGTLARRHQNGRF

SEQ ID NO: 1261 - protein, 18 aa, Artificial Sequence
  Description of Artificial Sequence: Synthetic peptide
  N-term H or Acetyl
  MOD_RES (1)..(1): Leu or Nle (i.e. isomer of Leucine)
  MOD_RES (14)..(14): Ser or Phospho-Ser
  MOD_RES (16)..(16): Modified Cys
  See specification as filed for detailed description of substitutions and preferred embodiments
LAKTTKKRPQRATSNCFS

SEQ ID NO: 1262 - protein, 18 aa, Artificial Sequence
  Description of Artificial Sequence: Synthetic peptide
  N-term H or Acetyl
  MOD_RES (1)..(1): Leu or Nle (i.e. isomer of Leucine)
  MOD_RES (16)..(16): Modified Cys
  MOD_RES (18)..(18): Ser or Phospho-Ser
  See specification as filed for detailed description of substitutions and preferred embodiments
LAKTTKKRPQRATSNCFS

SEQ ID NO: 1263 - protein, 20 aa, Artificial Sequence
  Description of Artificial Sequence: Synthetic peptide
  N-term H or Acetyl
  MOD_RES (1)..(1): Leu or Nle (i.e. isomer of Leucine)
  MOD_RES (8)..(8): Modified Cys
  MOD_RES (10)..(10): Thr or Phospho-Thr
  See specification as filed for detailed description of substitutions and preferred embodiments
LANPLMACGTLTRRHQNGRF

SEQ ID NO: 1264 - protein, 10 aa, Artificial Sequence
  Description of Artificial Sequence: Synthetic peptide
  N-term H or Acetyl
  MOD_RES (1)..(1): Leu or Nle (i.e. isomer of Leucine)
  MOD_RES (2)..(2): Modified Cys
  MOD_RES (4)..(4): Ser or Phospho-Ser
  See specification as filed for detailed description of substitutions and preferred embodiments
LCDSLRRKAK

SEQ ID NO: 1265 - protein, 8 aa, Artificial Sequence
  Description of Artificial Sequence: Synthetic peptide
  N-term H or Acetyl
  MOD_RES (1)..(1): Leu or Nle (i.e. isomer of Leucine)
  MOD_RES (2)..(2): Modified Cys
  MOD_RES (4)..(4): Ser or Phospho-Ser
  See specification as filed for detailed description of substitutions and preferred embodiments
LCLSPGPF

SEQ ID NO: 1266 - protein, 15 aa, Artificial Sequence
  Description of Artificial Sequence: Synthetic peptide
  N-term H or Acetyl
  MOD_RES (1)..(1): Leu or Nle (i.e. isomer of Leucine)
  MOD_RES (8)..(8): Thr or Phospho-Thr
  MOD_RES (10)..(10): Modified Cys
  See specification as filed for detailed description of substitutions and preferred embodiments
LKRPQRATSCVFAMF

SEQ ID NO: 1267 - protein, 12 aa, Artificial Sequence
  Description of Artificial Sequence: Synthetic peptide
  N-term H or Acetyl
  MOD_RES (1)..(1): Leu or Nle (i.e. isomer of Leucine)
  MOD_RES (5)..(5): Modified Cys
  MOD_RES (7)..(7): Ser or Phospho-Ser
  See specification as filed for detailed description of substitutions and preferred embodiments
LLLRCSSRRIRR

SEQ ID NO: 1268 - protein, 21 aa, Artificial Sequence
  Description of Artificial Sequence: Synthetic peptide
  N-term H or Acetyl
  MOD_RES (1)..(1): Leu or Nle (i.e. isomer of Leucine)
  MOD_RES (7)..(7): Modified Cys
  MOD_RES (9)..(9): Thr or Phospho-Thr
  See specification as filed for detailed description of substitutions and preferred embodiments
LLPWWRCYTWVVERDVNTKQR

SEQ ID NO: 1269 - protein, 15 aa, Artificial Sequence
  Description of Artificial Sequence: Synthetic peptide
  N-term H or Acetyl
  MOD_RES (1)..(1): Leu or Nle (i.e. isomer of Leucine)
  MOD_RES (10)..(10): Ser or Phospho-Ser
  MOD_RES (12)..(12): Modified Cys
  See specification as filed for detailed description of substitutions and preferred embodiments
LQREGFGRQSMCEKR

SEQ ID NO: 1270 - protein, 10 aa, Artificial Sequence
  Description of Artificial Sequence: Synthetic peptide
  N-term H or Acetyl
  MOD_RES (1)..(1): Leu or Nle (i.e. isomer of Leucine)
  MOD_RES (4)..(4): Modified Cys
  MOD_RES (6)..(6): Ser or Phospho-Ser
  See specification as filed for detailed description of substitutions and preferred embodiments
LRRCASFRRR

SEQ ID NO: 1271 - protein, 16 aa, Artificial Sequence
  Description of Artificial Sequence: Synthetic peptide
  N-term H or Acetyl
  MOD_RES (3)..(3): Modified Cys
  MOD_RES (5)..(5): Ser or Phospho-Ser
  See specification as filed for detailed description of substitutions and preferred embodiments
AACISPLGALQHGFFR

SEQ ID NO: 1272 - protein, 20 aa, Artificial Sequence
  Description of Artificial Sequence: Synthetic peptide
  N-term H or Acetyl
  MOD_RES (8)..(8): Modified Cys
  MOD_RES (10)..(10): Thr or Phospho-Thr
  See specification as filed for detailed description of substitutions and preferred embodiments
AANPLMACGTLTRRHQNGRF

SEQ ID NO: 1273 - protein, 10 aa, Artificial Sequence
  Description of Artificial Sequence: Synthetic peptide
  N-term H or Acetyl
  MOD_RES (2)..(2): Modified Cys
  MOD_RES (4)..(4): Ser or Phospho-Ser
  See specification as filed for detailed description of substitutions and preferred embodiments
ACDSLRRKAK

SEQ ID NO: 1274 - protein, 15 aa, Artificial Sequence
  Description of Artificial Sequence: Synthetic peptide
  N-term H or Acetyl
  MOD_RES (2)..(2): Modified Cys
  MOD_RES (4)..(4): Ser or Phospho-Ser
  See specification as filed for detailed description of substitutions and preferred embodiments
ACISPLGALQHGFFR

SEQ ID NO: 1275 - protein, 11 aa, Artificial Sequence
  Description of Artificial Sequence: Synthetic peptide
  N-term H or Acetyl
  MOD_RES (2)..(2): Modified Cys
  MOD_RES (4)..(4): Thr or Phospho-Thr
  See specification as filed for detailed description of substitutions and preferred embodiments
ACKTPKKAKKP

SEQ ID NO: 1276 - protein, 8 aa, Artificial Sequence
  Description of Artificial Sequence: Synthetic peptide
  N-term H or Acetyl
  MOD_RES (2)..(2): Modified Cys
  MOD_RES (4)..(4): Ser or Phospho-Ser
  See specification as filed for detailed description of substitutions and preferred embodiments
ACLSPGPF

SEQ ID NO: 1277 - protein, 21 aa, Artificial Sequence
  Description of Artificial Sequence: Synthetic peptide
  N-term H or Acetyl
  MOD_RES (8)..(8): Thr or Phospho-Thr
  MOD_RES (10)..(10): Modified Cys
  See specification as filed for detailed description of substitutions and preferred embodiments
ADPDHDHTGCLTEYVATRWRR

SEQ ID NO: 1278 - protein, 21 aa, Artificial Sequence
  Description of Artificial Sequence: Synthetic peptide
  N-term H or Acetyl
  MOD_RES (10)..(10): Modified Cys
  MOD_RES (12)..(12): Thr or Phospho-Thr
  See specification as filed for detailed description of substitutions and preferred embodiments
ADPDHDHTGCLTEYVATRWRR

SEQ ID NO: 1279 - protein, 18 aa, Artificial Sequence
  Description of Artificial Sequence: Synthetic peptide
  N-term H or Acetyl
  MOD_RES (3)..(3): Modified Cys
  MOD_RES (5)..(5): Ser or Phospho-Ser
  See specification as filed for detailed description of substitutions and preferred embodiments
AECQSLNAADVENLHLPL

SEQ ID NO: 1280 - protein, 18 aa, Artificial Sequence
  Description of Artificial Sequence: Synthetic peptide
  N-term H or Acetyl
  MOD_RES (5)..(5): Ser or Phospho-Ser
  MOD_RES (7)..(7): Modified Cys
  See specification as filed for detailed description of substitutions and preferred embodiments
AESQSLCAADVENLHLPL

SEQ ID NO: 1281 - protein, 15 aa, Artificial Sequence
  Description of Artificial Sequence: Synthetic peptide
  N-term H or Acetyl
  MOD_RES (7)..(7): Modified Cys
  MOD_RES (9)..(9): Ser or Phospho-Ser
  See specification as filed for detailed description of substitutions and preferred embodiments
AFRLERCDSIFYPRR

SEQ ID NO: 1282 - protein, 17 aa, Artificial Sequence
  Description of Artificial Sequence: Synthetic peptide
  N-term H or Acetyl
  MOD_RES (4)..(4): Ser or Phospho-Ser
  MOD_RES (6)..(6): Modified Cys
  MOD_RES (7)..(7): Leu or Nle (i.e. isomer of Leucine)
  MOD_RES (10)..(10): Tyr or Phospho-Tyr
  See specification as filed for detailed description of substitutions and preferred embodiments
AGTSFCLTPYVVTRKKK

SEQ ID NO: 1283 - protein, 17 aa, Artificial Sequence
  Description of Artificial Sequence: Synthetic peptide
  N-term H or Acetyl
  MOD_RES (4)..(4): Ser or Phospho-Ser
  MOD_RES (6)..(6): Modified Cys
  MOD_RES (7)..(7): Leu or Nle (i.e. isomer of Leucine)
  See specification as filed for detailed description of substitutions and preferred embodiments
AGTSFCLTPYVVTRKKK

SEQ ID NO: 1284 - protein, 17 aa, Artificial Sequence
  Description of Artificial Sequence: Synthetic peptide
  N-term H or Acetyl
  MOD_RES (6)..(6): Modified Cys
  MOD_RES (7)..(7): Leu or Nle (i.e. isomer of Leucine)
  MOD_RES (8)..(8): Thr or Phospho-Thr
  MOD_RES (10)..(10): Tyr or Phospho-Tyr
  See specification as filed for detailed description of substitutions and preferred embodiments
AGTSFCLTPYVVTRKKK

SEQ ID NO: 1285 - protein, 17 aa, Artificial Sequence
  Description of Artificial Sequence: Synthetic peptide
  N-term H or Acetyl
  MOD_RES (6)..(6): Modified Cys
  MOD_RES (7)..(7): Leu or Nle (i.e. isomer of Leucine)
  MOD_RES (8)..(8): Thr or Phospho-Thr
  See specification as filed for detailed description of substitutions and preferred embodiments
AGTSFCLTPYVVTRKKK

SEQ ID NO: 1286 - protein, 15 aa, Artificial Sequence
  Description of Artificial Sequence: Synthetic peptide
  N-term H or Acetyl
  MOD_RES (6)..(6): Modified Cys
  MOD_RES (8)..(8): Ser or Phospho-Ser
  See specification as filed for detailed description of substitutions and preferred embodiments
AHEGVCLSVPEYRSR

SEQ ID NO: 1287 - protein, 12 aa, Artificial Sequence
  Description of Artificial Sequence: Synthetic peptide
  N-term H or Acetyl
  MOD_RES (8)..(8): Ser or Phospho-Ser
  MOD_RES (10)..(10): Modified Cys
  See specification as filed for detailed description of substitutions and preferred embodiments
AHLQRQLSICEN

SEQ ID NO: 1288 - protein, 12 aa, Artificial Sequence
  Description of Artificial Sequence: Synthetic peptide
  N-term H or Acetyl
  MOD_RES (8)..(8): Ser or Phospho-Ser
  MOD_RES (10)..(10): Modified Cys
  See specification as filed for detailed description of substitutions and preferred embodiments
AHLQRQLSICEP

SEQ ID NO: 1289 - protein, 12 aa, Artificial Sequence
  Description of Artificial Sequence: Synthetic peptide
  N-term H or Acetyl
  MOD_RES (8)..(8): Ser or Phospho-Ser
  MOD_RES (10)..(10): Modified Cys
  See specification as filed for detailed description of substitutions and preferred embodiments
AHLQRQLSICFA

SEQ ID NO: 1290 - protein, 12 aa, Artificial Sequence
  Description of Artificial Sequence: Synthetic peptide
  N-term H or Acetyl
  MOD_RES (8)..(8): Ser or Phospho-Ser
  MOD_RES (10)..(10): Modified Cys
  See specification as filed for detailed description of substitutions and preferred embodiments
AHLQRQLSICFS

SEQ ID NO: 1291 - protein, 12 aa, Artificial Sequence
  Description of Artificial Sequence: Synthetic peptide
  N-term H or Acetyl
  MOD_RES (8)..(8): Ser or Phospho-Ser
  MOD_RES (10)..(10): Modified Cys
  See specification as filed for detailed description of substitutions and preferred embodiments
AHLQRQLSICHH

SEQ ID NO: 1292 - protein, 12 aa, Artificial Sequence
  Description of Artificial Sequence: Synthetic peptide
  N-term H or Acetyl
  MOD_RES (10)..(10): Modified Cys
  MOD_RES (12)..(12): Ser or Phospho-Ser
  See specification as filed for detailed description of substitutions and preferred embodiments
AHLQRQLSICFS

SEQ ID NO: 1293 - protein, 13 aa, Artificial Sequence
  Description of Artificial Sequence: Synthetic peptide
  N-term H or Acetyl
  MOD_RES (8)..(8): Thr or Phospho-Thr
  MOD_RES (10)..(10): Modified Cys
  See specification as filed for detailed description of substitutions and preferred embodiments
AKRPQRATSCVFA

SEQ ID NO: 1294 - protein, 12 aa, Artificial Sequence
  Description of Artificial Sequence: Synthetic peptide
  N-term H or Acetyl
  MOD_RES (8)..(8): Thr or Phospho-Thr
  MOD_RES (10)..(10): Modified Cys
  See specification as filed for detailed description of substitutions and preferred embodiments
AKRPQRATSCVF

SEQ ID NO: 1295 - protein, 13 aa, Artificial Sequence
  Description of Artificial Sequence: Synthetic peptide
  N-term H or Acetyl
  MOD_RES (9)..(9): Ser or Phospho-Ser
  MOD_RES (11)..(11): Modified Cys
  See specification as filed for detailed description of substitutions and preferred embodiments
AKRPQRATSNCFA

SEQ ID NO: 1296 - protein, 12 aa, Artificial Sequence
  Description of Artificial Sequence: Synthetic peptide
  N-term H or Acetyl
  MOD_RES (9)..(9): Ser or Phospho-Ser
  MOD_RES (11)..(11): Modified Cys
  See specification as filed for detailed description of substitutions and preferred embodiments
AKRPQRATSNCF

SEQ ID NO: 1297 - protein, 15 aa, Artificial Sequence
  Description of Artificial Sequence: Synthetic peptide
  N-term H or Acetyl
  MOD_RES (8)..(8): Ser or Phospho-Ser
  MOD_RES (10)..(10): Modified Cys
  See specification as filed for detailed description of substitutions and preferred embodiments
AKRRRLASLCASTSK

SEQ ID NO: 1298 - protein, 15 aa, Artificial Sequence
  Description of Artificial Sequence: Synthetic peptide
  N-term H or Acetyl
  MOD_RES (10)..(10): Modified Cys
  MOD_RES (12)..(12): Ser or Phospho-Ser
  See specification as filed for detailed description of substitutions and preferred embodiments
AKRRRLASLCASTSK

SEQ ID NO: 1299 - protein, 14 aa, Artificial Sequence
  Description of Artificial Sequence: Synthetic peptide
  N-term H or Acetyl
  MOD_RES (8)..(8): Ser or Phospho-Ser
  MOD_RES (10)..(10): Modified Cys
  See specification as filed for detailed description of substitutions and preferred embodiments
ALKLSRYSFCITAK

SEQ ID NO: 1300 - protein, 14 aa, Artificial Sequence
  Description of Artificial Sequence: Synthetic peptide
  N-term H or Acetyl
  MOD_RES (10)..(10): Modified Cys
  MOD_RES (12)..(12): Thr or Phospho-Thr
  See specification as filed for detailed description of substitutions and preferred embodiments
ALKLSRYSFCITAK

SEQ ID NO: 1301 - protein, 12 aa, Artificial Sequence
  Description of Artificial Sequence: Synthetic peptide
  N-term H or Acetyl
  MOD_RES (5)..(5): Modified Cys
  MOD_RES (7)..(7): Ser or Phospho-Ser
  See specification as filed for detailed description of substitutions and preferred embodiments
ALLRCSSRRIRR

SEQ ID NO: 1302 - protein, 21 aa, Artificial Sequence
  Description of Artificial Sequence: Synthetic peptide
  N-term H or Acetyl
  MOD_RES (7)..(7): Modified Cys
  MOD_RES (9)..(9): Thr or Phospho-Thr
  See specification as filed for detailed description of substitutions and preferred embodiments
ALPWWRCYTWVVERDVNTKQR

SEQ ID NO: 1303 - protein, 10 aa, Artificial Sequence
  Description of Artificial Sequence: Synthetic peptide
  N-term H or Acetyl
  MOD_RES (6)..(6): Ser or Phospho-Ser
  MOD_RES (8)..(8): Modified Cys
  See specification as filed for detailed description of substitutions and preferred embodiments
ALRRASLCAA

SEQ ID NO: 1304 - protein, 10 aa, Artificial Sequence
  Description of Artificial Sequence: Synthetic peptide
  N-term H or Acetyl
  MOD_RES (6)..(6): Ser or Phospho-Ser
  MOD_RES (8)..(8): Modified Cys
  See specification as filed for detailed description of substitutions and preferred embodiments
ALRRFSLCGA

SEQ ID NO: 1305 - protein, 17 aa, Artificial Sequence
  Description of Artificial Sequence: Synthetic peptide
  N-term H or Acetyl
  MOD_RES (3)..(3): Modified Cys
  MOD_RES (5)..(5): Ser or Phospho-Ser
  See specification as filed for detailed description of substitutions and preferred embodiments
APCPSQAMDDLMLSPDD

SEQ ID NO: 1306 - protein, 15 aa, Artificial Sequence
  Description of Artificial Sequence: Synthetic peptide
  N-term H or Acetyl
  MOD_RES (6)..(6): Modified Cys
  MOD_RES (8)..(8): Thr or Phospho-Thr
  See specification as filed for detailed description of substitutions and preferred embodiments
APEKGCPTPQVLQRN

SEQ ID NO: 1307 - protein, 15 aa, Artificial Sequence
  Description of Artificial Sequence: Synthetic peptide
  N-term H or Acetyl
  MOD_RES (8)..(8): Thr or Phospho-Thr
  MOD_RES (10)..(10): Modified Cys
  See specification as filed for detailed description of substitutions and preferred embodiments
APEKGLPTPCVLQRN

SEQ ID NO: 1308 - protein, 15 aa, Artificial Sequence
  Description of Artificial Sequence: Synthetic peptide
  N-term H or Acetyl
  MOD_RES (6)..(6): Modified Cys
  MOD_RES (8)..(8): Ser or Phospho-Ser
  See specification as filed for detailed description of substitutions and preferred embodiments
APEVLCSSHRYTLGV

SEQ ID NO: 1309 - protein, 14 aa, Artificial Sequence
  Description of Artificial Sequence: Synthetic peptide
  N-term H or Acetyl
  MOD_RES (7)..(7): Thr or Phospho-Thr
  MOD_RES (9)..(9): Modified Cys
  See specification as filed for detailed description of substitutions and preferred embodiments
APPSEETPCIPQRS

SEQ ID NO: 1310 - protein, 17 aa, Artificial Sequence
  Description of Artificial Sequence: Synthetic peptide
  N-term H or Acetyl
  MOD_RES (10)..(10): Ser or Phospho-Ser
  MOD_RES (11)..(11): Leu or Nle (i.e. isomer of Leucine)
  MOD_RES (12)..(12): Modified Cys
  MOD_RES (16)..(16): Thr or Phospho-Thr
  See specification as filed for detailed description of substitutions and preferred embodiments
AQAEGFGRQSLCEKRTK

SEQ ID NO: 1311 - protein, 17 aa, Artificial Sequence
  Description of Artificial Sequence: Synthetic peptide
  N-term H or Acetyl
  MOD_RES (10)..(10): Ser or Phospho-Ser
  MOD_RES (11)..(11): Leu or Nle (i.e. isomer of Leucine)
  MOD_RES (12)..(12): Modified Cys
  See specification as filed for detailed description of substitutions and preferred embodiments
AQAEGFGRQSLCEKRTK

SEQ ID NO: 1312 - protein, 17 aa, Artificial Sequence
  Description of Artificial Sequence: Synthetic peptide
  N-term H or Acetyl
  MOD_RES (10)..(10): Ser or Phospho-Ser
  MOD_RES (12)..(12): Modified Cys
  MOD_RES (16)..(16): Thr or Phospho-Thr
  See specification as filed for detailed description of substitutions and preferred embodiments
AQAEGFGRQSMCEKRTK

SEQ ID NO: 1313 - protein, 17 aa, Artificial Sequence
  Description of Artificial Sequence: Synthetic peptide
  N-term H or Acetyl
  MOD_RES (10)..(10): Ser or Phospho-Ser
  MOD_RES (12)..(12): Modified Cys
  See specification as filed for detailed description of substitutions and preferred embodiments
AQAEGFGRQSMCEKRTK

SEQ ID NO: 1314 - protein, 15 aa, Artificial Sequence
  Description of Artificial Sequence: Synthetic peptide
  N-term H or Acetyl
  MOD_RES (10)..(10): Ser or Phospho-Ser
  MOD_RES (12)..(12): Modified Cys
  See specification as filed for detailed description of substitutions and preferred embodiments
AQREGFGRQSMCEKR

SEQ ID NO: 1315 - protein, 9 aa, Artificial Sequence
  Description of Artificial Sequence: Synthetic peptide
  N-term H or Acetyl
  MOD_RES (3)..(3): Modified Cys
  MOD_RES (5)..(5): Ser or Phospho-Ser
  See specification as filed for detailed description of substitutions and preferred embodiments
ARCLSFAEG

SEQ ID NO: 1316 - protein, 10 aa, Artificial Sequence
  Description of Artificial Sequence: Synthetic peptide
  N-term H or Acetyl
  MOD_RES (3)..(3): Modified Cys
  MOD_RES (5)..(5): Ser or Phospho-Ser
  See specification as filed for detailed description of substitutions and preferred embodiments
ARCLSFAEPG

SEQ ID NO: 1317 - protein, 13 aa, Artificial Sequence
  Description of Artificial Sequence: Synthetic peptide
  N-term H or Acetyl
  MOD_RES (9)..(9): Ser or Phospho-Ser
  MOD_RES (10)..(10): Leu or Nle (i.e. isomer of Leucine)
  MOD_RES (11)..(11): Pro or d-isoform of Pro
  MOD_RES (12)..(12): Modified Cys
  See specification as filed for detailed description of substitutions and preferred embodiments
ARKRERAYSLPCG

SEQ ID NO: 1318 - protein, 12 aa, Artificial Sequence
  Description of Artificial Sequence: Synthetic peptide
  N-term H or Acetyl
  MOD_RES (9)..(9): Ser or Phospho-Ser
  MOD_RES (10)..(10): Leu or Nle (i.e. isomer of Leucine)
  MOD_RES (11)..(11): Modified Cys
  See specification as filed for detailed description of substitutions and preferred embodiments
ARKRERAYSLCG

SEQ ID NO: 1319 - protein, 12 aa, Artificial Sequence
  Description of Artificial Sequence: Synthetic peptide
  N-term H or Acetyl
  MOD_RES (9)..(9): Ser or Phospho-Ser
  MOD_RES (11)..(11): Modified Cys
  See specification as filed for detailed description of substitutions and preferred embodiments
ARKRERAYSACG

SEQ ID NO: 1320 - protein, 13 aa, Artificial Sequence
  Description of Artificial Sequence: Synthetic peptide
  N-term H or Acetyl
  MOD_RES (9)..(9): Ser or Phospho-Ser
  MOD_RES (11)..(11): Pro or d-isoform of Pro
  MOD_RES (12)..(12): Modified Cys
  See specification as filed for detailed description of substitutions and preferred embodiments
ARKRERAYSEPCG

SEQ ID NO: 1321 - protein, 13 aa, Artificial Sequence
  Description of Artificial Sequence: Synthetic peptide
  N-term H or Acetyl
  MOD_RES (9)..(9): Ser or Phospho-Ser
  MOD_RES (11)..(11): Pro or d-isoform of Pro
  MOD_RES (12)..(12): Modified Cys
  See specification as filed for detailed description of substitutions and preferred embodiments
ARKRERAYSFPCG

SEQ ID NO: 1322 - protein, 13 aa, Artificial Sequence
  Description of Artificial Sequence: Synthetic peptide
  N-term H or Acetyl
  MOD_RES (9)..(9): Ser or Phospho-Ser
  MOD_RES (12)..(12): Modified Cys
  See specification as filed for detailed description of substitutions and preferred embodiments
ARKRERAYSFACG

SEQ ID NO: 1323 - protein, 12 aa, Artificial Sequence
  Description of Artificial Sequence: Synthetic peptide
  N-term H or Acetyl
  MOD_RES (9)..(9): Ser or Phospho-Ser
  MOD_RES (11)..(11): Modified Cys
  See specification as filed for detailed description of substitutions and preferred embodiments
ARKRERAYSFCG

SEQ ID NO: 1324 - protein, 13 aa, Artificial Sequence
  Description of Artificial Sequence: Synthetic peptide
  N-term H or Acetyl
  MOD_RES (9)..(9): Ser or Phospho-Ser
  MOD_RES (12)..(12): Modified Cys
  See specification as filed for detailed description of substitutions and preferred embodiments
ARKRERAYSFDCG

SEQ ID NO: 1325 - protein, 13 aa, Artificial Sequence
  Description of Artificial Sequence: Synthetic peptide
  N-term H or Acetyl
  MOD_RES (9)..(9): Ser or Phospho-Ser
  MOD_RES (12)..(12): Modified Cys
  See specification as filed for detailed description of substitutions and preferred embodiments
ARKRERAYSFECG

SEQ ID NO: 1326 - protein, 13 aa, Artificial Sequence
  Description of Artificial Sequence: Synthetic peptide
  N-term H or Acetyl
  MOD_RES (9)..(9): Ser or Phospho-Ser
  MOD_RES (12)..(12): Modified Cys
  See specification as filed for detailed description of substitutions and preferred embodiments
ARKRERAYSFFCG

SEQ ID NO: 1327 - protein, 13 aa, Artificial Sequence
  Description of Artificial Sequence: Synthetic peptide
  N-term H or Acetyl
  MOD_RES (9)..(9): Ser or Phospho-Ser
  MOD_RES (12)..(12): Modified Cys
  See specification as filed for detailed description of substitutions and preferred embodiments
ARKRERAYSFGCG

SEQ ID NO: 1328 - protein, 13 aa, Artificial Sequence
  Description of Artificial Sequence: Synthetic peptide
  N-term H or Acetyl
  MOD_RES (9)..(9): Ser or Phospho-Ser
  MOD_RES (12)..(12): Modified Cys
  See specification as filed for detailed description of substitutions and preferred embodiments
ARKRERAYSFHCG

SEQ ID NO: 1329 - protein, 13 aa, Artificial Sequence
  Description of Artificial Sequence: Synthetic peptide
  N-term H or Acetyl
  MOD_RES (9)..(9): Ser or Phospho-Ser
  MOD_RES (12)..(12): Modified Cys
  See specification as filed for detailed description of substitutions and preferred embodiments
ARKRERAYSFICG

SEQ ID NO: 1330 - protein, 13 aa, Artificial Sequence
  Description of Artificial Sequence: Synthetic peptide
  N-term H or Acetyl
  MOD_RES (9)..(9): Ser or Phospho-Ser
  MOD_RES (12)..(12): Modified Cys
  See specification as filed for detailed description of substitutions and preferred embodiments
ARKRERAYSFKCG

SEQ ID NO: 1331 - protein, 13 aa, Artificial Sequence
  Description of Artificial Sequence: Synthetic peptide
  N-term H or Acetyl
  MOD_RES (9)..(9): Ser or Phospho-Ser
  MOD_RES (12)..(12): Modified Cys
  See specification as filed for detailed description of substitutions and preferred embodiments
ARKRERAYSFLCG

SEQ ID NO: 1332 - protein, 13 aa, Artificial Sequence
  Description of Artificial Sequence: Synthetic peptide
  N-term H or Acetyl
  MOD_RES (9)..(9): Ser or Phospho-Ser
  MOD_RES (12)..(12): Modified Cys
  See specification as filed for detailed description of substitutions and preferred embodiments
ARKRERAYSFNCG

SEQ ID NO: 1333 - protein, 13 aa, Artificial Sequence
  Description of Artificial Sequence: Synthetic peptide
  N-term H or Acetyl
  MOD_RES (9)..(9): Ser or Phospho-Ser
  MOD_RES (12)..(12): Modified Cys
  See specification as filed for detailed description of substitutions and preferred embodiments
ARKRERAYSFPCG

SEQ ID NO: 1334 - protein, 13 aa, Artificial Sequence
  Description of Artificial Sequence: Synthetic peptide
  N-term H or Acetyl
  MOD_RES (9)..(9): Ser or Phospho-Ser
  MOD_RES (12)..(12): Modified Cys
  See specification as filed for detailed description of substitutions and preferred embodiments
ARKRERAYSFQCG

SEQ ID NO: 1335 - protein, 13 aa, Artificial Sequence
  Description of Artificial Sequence: Synthetic peptide
  N-term H or Acetyl
  MOD_RES (9)..(9): Ser or Phospho-Ser
  MOD_RES (12)..(12): Modified Cys
  See specification as filed for detailed description of substitutions and preferred embodiments
ARKRERAYSFRCG

SEQ ID NO: 1336 - protein, 13 aa, Artificial Sequence
  Description of Artificial Sequence: Synthetic peptide
  N-term H or Acetyl
  MOD_RES (9)..(9): Ser or Phospho-Ser
  MOD_RES (12)..(12): Modified Cys
  See specification as filed for detailed description of substitutions and preferred embodiments
ARKRERAYSFVCG

SEQ ID NO: 1337 - protein, 13 aa, Artificial Sequence
  Description of Artificial Sequence: Synthetic peptide
  N-term H or Acetyl
  MOD_RES (9)..(9): Ser or Phospho-Ser
  MOD_RES (12)..(12): Modified Cys
  See specification as filed for detailed description of substitutions and preferred embodiments
ARKRERAYSFWCG

SEQ ID NO: 1338 - protein, 13 aa, Artificial Sequence
  Description of Artificial Sequence: Synthetic peptide
  N-term H or Acetyl
  MOD_RES (9)..(9): Ser or Phospho-Ser
  MOD_RES (11)..(11): Pro or d-isoform of Pro
  MOD_RES (12)..(12): Modified Cys
  See specification as filed for detailed description of substitutions and preferred embodiments
ARKRERAYSGPCG

SEQ ID NO: 1339 - protein, 12 aa, Artificial Sequence
  Description of Artificial Sequence: Synthetic peptide
  N-term H or Acetyl
  MOD_RES (9)..(9): Ser or Phospho-Ser
  MOD_RES (11)..(11): Modified Cys
  See specification as filed for detailed description of substitutions and preferred embodiments
ARKRERAYSGCG

SEQ ID NO: 1340 - protein, 13 aa, Artificial Sequence
  Description of Artificial Sequence: Synthetic peptide
  N-term H or Acetyl
  MOD_RES (9)..(9): Ser or Phospho-Ser
  MOD_RES (12)..(12): Modified Cys
  See specification as filed for detailed description of substitutions and preferred embodiments
ARKRERAYSGGCG

SEQ ID NO: 1341 - protein, 13 aa, Artificial Sequence
  Description of Artificial Sequence: Synthetic peptide
  N-term H or Acetyl
  MOD_RES (9)..(9): Ser or Phospho-Ser
  MOD_RES (11)..(11): Pro or d-isoform of Pro
  MOD_RES (12)..(12): Modified Cys
  See specification as filed for detailed description of substitutions and preferred embodiments
ARKRERAYSHPCG

SEQ ID NO: 1342 - protein, 12 aa, Artificial Sequence
  Description of Artificial Sequence: Synthetic peptide
  N-term H or Acetyl
  MOD_RES (9)..(9): Ser or Phospho-Ser
  MOD_RES (11)..(11): Modified Cys
  See specification as filed for detailed description of substitutions and preferred embodiments
ARKRERAYSHCG

SEQ ID NO: 1343 - protein, 13 aa, Artificial Sequence
  Description of Artificial Sequence: Synthetic peptide
  N-term H or Acetyl
  MOD_RES (9)..(9): Ser or Phospho-Ser
  MOD_RES (11)..(11): Pro or d-isoform of Pro
  MOD_RES (12)..(12): Modified Cys
  See specification as filed for detailed description of substitutions and preferred embodiments
ARKRERAYSIPCG

SEQ ID NO: 1344 - protein, 12 aa, Artificial Sequence
  Description of Artificial Sequence: Synthetic peptide
  N-term H or Acetyl
  MOD_RES (9)..(9): Ser or Phospho-Ser
  MOD_RES (11)..(11): Modified Cys
  See specification as filed for detailed description of substitutions and preferred embodiments
ARKRERAYSICG

SEQ ID NO: 1345 - protein, 13 aa, Artificial Sequence
  Description of Artificial Sequence: Synthetic peptide
  N-term H or Acetyl
  MOD_RES (9)..(9): Ser or Phospho-Ser
  MOD_RES (11)..(11): Pro or d-isoform of Pro
  MOD_RES (12)..(12): Modified Cys
  See specification as filed for detailed description of substitutions and preferred embodiments
ARKRERAYSKPCG

SEQ ID NO: 1346 - protein, 12 aa, Artificial Sequence
  Description of Artificial Sequence: Synthetic peptide
  N-term H or Acetyl
  MOD_RES (9)..(9): Ser or Phospho-Ser
  MOD_RES (11)..(11): Modified Cys
  See specification as filed for detailed description of substitutions and preferred embodiments
ARKRERAYSKCG

SEQ ID NO: 1347 - protein, 13 aa, Artificial Sequence
  Description of Artificial Sequence: Synthetic peptide
  N-term H or Acetyl
  MOD_RES (9)..(9): Ser or Phospho-Ser
  MOD_RES (11)..(11): Pro or d-isoform of Pro
  MOD_RES (12)..(12): Modified Cys
  See specification as filed for detailed description of substitutions and preferred embodiments
ARKRERAYSLPCG

SEQ ID NO: 1348 - protein, 12 aa, Artificial Sequence
  Description of Artificial Sequence: Synthetic peptide
  N-term H or Acetyl
  MOD_RES (9)..(9): Ser or Phospho-Ser
  MOD_RES (11)..(11): Modified Cys
  See specification as filed for detailed description of substitutions and preferred embodiments
ARKRERAYSLCG

SEQ ID NO: 1349 - protein, 12 aa, Artificial Sequence
  Description of Artificial Sequence: Synthetic peptide
  N-term H or Acetyl
  MOD_RES (9)..(9): Ser or Phospho-Ser
  MOD_RES (11)..(11): Modified Cys
  See specification as filed for detailed description of substitutions and preferred embodiments
ARKRERAYSNCG

SEQ ID NO: 1350 - protein, 12 aa, Artificial Sequence
  Description of Artificial Sequence: Synthetic peptide
  N-term H or Acetyl
  MOD_RES (9)..(9): Ser or Phospho-Ser
  MOD_RES (11)..(11): Modified Cys
  See specification as filed for detailed description of substitutions and preferred embodiments
ARKRERAYSPCG

SEQ ID NO: 1351 - protein, 13 aa, Artificial Sequence
  Description of Artificial Sequence: Synthetic peptide
  N-term H or Acetyl
  MOD_RES (9)..(9): Ser or Phospho-Ser
  MOD_RES (11)..(11): Pro or d-isoform of Pro
  MOD_RES (12)..(12): Modified Cys
  See specification as filed for detailed description of substitutions and preferred embodiments
ARKRERAYSQPCG

SEQ ID NO: 1352 - protein, 12 aa, Artificial Sequence
  Description of Artificial Sequence: Synthetic peptide
  N-term H or Acetyl
  MOD_RES (9)..(9): Ser or Phospho-Ser
  MOD_RES (11)..(11): Modified Cys
  See specification as filed for detailed description of substitutions and preferred embodiments
ARKRERAYSQCG

SEQ ID NO: 1353 - protein, 13 aa, Artificial Sequence
  Description of Artificial Sequence: Synthetic peptide
  N-term H or Acetyl
  MOD_RES (9)..(9): Ser or Phospho-Ser
  MOD_RES (11)..(11): Pro or d-isoform of Pro
  MOD_RES (12)..(12): Modified Cys
  See specification as filed for detailed description of substitutions and preferred embodiments
ARKRERAYSRPCG

SEQ ID NO: 1354 - protein, 12 aa, Artificial Sequence
  Description of Artificial Sequence: Synthetic peptide
  N-term H or Acetyl
  MOD_RES (9)..(9): Ser or Phospho-Ser
  MOD_RES (11)..(11): Modified Cys
  See specification as filed for detailed description of substitutions and preferred embodiments
ARKRERAYSRCG

SEQ ID NO: 1355 - protein, 13 aa, Artificial Sequence
  Description of Artificial Sequence: Synthetic peptide
  N-term H or Acetyl
  MOD_RES (9)..(9): Ser or Phospho-Ser
  MOD_RES (11)..(11): Pro or d-isoform of Pro
  MOD_RES (12)..(12): Modified Cys
  See specification as filed for detailed description of substitutions and preferred embodiments
ARKRERAYSVPCG

SEQ ID NO: 1356 - protein, 12 aa, Artificial Sequence
  Description of Artificial Sequence: Synthetic peptide
  N-term H or Acetyl
  MOD_RES (9)..(9): Ser or Phospho-Ser
  MOD_RES (11)..(11): Modified Cys
  See specification as filed for detailed description of substitutions and preferred embodiments
ARKRERAYSVCG

SEQ ID NO: 1357 - protein, 13 aa, Artificial Sequence
  Description of Artificial Sequence: Synthetic peptide
  N-term H or Acetyl
  MOD_RES (9)..(9): Ser or Phospho-Ser
  MOD_RES (11)..(11): Pro or d-isoform of Pro
  MOD_RES (12)..(12): Modified Cys
  See specification as filed for detailed description of substitutions and preferred embodiments
ARKRERAYSWPCG

SEQ ID NO: 1358 - protein, 12 aa, Artificial Sequence
  Description of Artificial Sequence: Synthetic peptide
  N-term H or Acetyl
  MOD_RES (9)..(9): Ser or Phospho-Ser
  MOD_RES (11)..(11): Modified Cys
  See specification as filed for detailed description of substitutions and preferred embodiments
ARKRERAYSWCG

SEQ ID NO: 1359 - protein, 13 aa, Artificial Sequence
  Description of Artificial Sequence: Synthetic peptide
  N-term H or Acetyl
  MOD_RES (11)..(11): Pro or d-isoform of Pro
  MOD_RES (12)..(12): Modified Cys
  See specification as filed for detailed description of substitutions and preferred embodiments
ARKRERAYSNPCG

SEQ ID NO: 1360 - protein, 13 aa, Artificial Sequence
  Description of Artificial Sequence: Synthetic peptide
  N-term H or Acetyl
  MOD_RES (11)..(11): Pro or d-isoform of Pro
  MOD_RES (12)..(12): Modified Cys
  See specification as filed for detailed description of substitutions and preferred embodiments
ARKRERAYSPPCG

SEQ ID NO: 1361 - protein, 14 aa, Artificial Sequence
  Description of Artificial Sequence: Synthetic peptide
  N-term H or Acetyl
  MOD_RES (9)..(9): Ser or Phospho-Ser
  MOD_RES (11)..(11): Modified Cys
  See specification as filed for detailed description of substitutions and preferred embodiments
ARKRRRHPSGCPTA

SEQ ID NO: 1362 - protein, 10 aa, Artificial Sequence
  Description of Artificial Sequence: Synthetic peptide
  N-term H or Acetyl
  MOD_RES (4)..(4): Modified Cys
  MOD_RES (6)..(6): Ser or Phospho-Ser
  See specification as filed for detailed description of substitutions and preferred embodiments
ARRCASFRRR

SEQ ID NO: 1363 - protein, 18 aa, Artificial Sequence
  Description of Artificial Sequence: Synthetic peptide
  N-term H or Acetyl
  MOD_RES (3)..(3): Thr or Phospho-Thr
  MOD_RES (5)..(5): Modified Cys
  See specification as filed for detailed description of substitutions and preferred embodiments
ARTKCTARKSTGGKAPRK

SEQ ID NO: 1364 - protein, 14 aa, Artificial Sequence
  Description of Artificial Sequence: Synthetic peptide
  N-term H or Acetyl
  MOD_RES (3)..(3): Thr or Phospho-Thr
  MOD_RES (5)..(5): Modified Cys
  See specification as filed for detailed description of substitutions and preferred embodiments
ARTKCTARKSTGGK

SEQ ID NO: 1365 - protein, 18 aa, Artificial Sequence
  Description of Artificial Sequence: Synthetic peptide
  N-term H or Acetyl
  MOD_RES (6)..(6): Thr or Phospho-Thr
  MOD_RES (8)..(8): Modified Cys
  See specification as filed for detailed description of substitutions and preferred embodiments
ARTKQTACKSTGGKAPRK

SEQ ID NO: 1366 - protein, 14 aa, Artificial Sequence
  Description of Artificial Sequence: Synthetic peptide
  N-term H or Acetyl
  MOD_RES (6)..(6): Thr or Phospho-Thr
  MOD_RES (8)..(8): Modified Cys
  See specification as filed for detailed description of substitutions and preferred embodiments
ARTKQTACKSTGGK

SEQ ID NO: 1367 - protein, 18 aa, Artificial Sequence
  Description of Artificial Sequence: Synthetic peptide
  N-term H or Acetyl
  MOD_RES (10)..(10): Ser or Phospho-Ser
  MOD_RES (12)..(12): Modified Cys
  See specification as filed for detailed description of substitutions and preferred embodiments
ARTKQTARKSTCGKAPRK

SEQ ID NO: 1368 - protein, 14 aa, Artificial Sequence
  Description of Artificial Sequence: Synthetic peptide
  N-term H or Acetyl
  MOD_RES (10)..(10): Ser or Phospho-Ser
  MOD_RES (12)..(12): Modified Cys
  See specification as filed for detailed description of substitutions and preferred embodiments
ARTKQTARKSTCGK

SEQ ID NO: 1369 - protein, 15 aa, Artificial Sequence
  Description of Artificial Sequence: Synthetic peptide
  N-term H or Acetyl
  MOD_RES (4)..(4): Ser or Phospho-Ser
  MOD_RES (6)..(6): Modified Cys
  See specification as filed for detailed description of substitutions and preferred embodiments
ARVSPCESPRARAAA

SEQ ID NO: 1370 - protein, 15 aa, Artificial Sequence
  Description of Artificial Sequence: Synthetic peptide
  N-term H or Acetyl
  MOD_RES (6)..(6): Modified Cys
  MOD_RES (8)..(8): Ser or Phospho-Ser
  See specification as filed for detailed description of substitutions and preferred embodiments
ARVSPCESPRARAAA

SEQ ID NO: 1371 - protein, 15 aa, Artificial Sequence
  Description of Artificial Sequence: Synthetic peptide
  N-term H or Acetyl
  MOD_RES (8)..(8): Ser or Phospho-Ser
  MOD_RES (10)..(10): Modified Cys
  See specification as filed for detailed description of substitutions and preferred embodiments
ARVSPPESPCARAAA

SEQ ID NO: 1372 - protein, 15 aa, Artificial Sequence
  Description of Artificial Sequence: Synthetic peptide
  N-term H or Acetyl
  MOD_RES (8)..(8): Thr or Phospho-Thr
  MOD_RES (10)..(10): Modified Cys
  See specification as filed for detailed description of substitutions and preferred embodiments
ATEEIYLTPCQRPPD

SEQ ID NO: 1373 - protein, 15 aa, Artificial Sequence
  Description of Artificial Sequence: Synthetic peptide
  N-term H or Acetyl
  MOD_RES (8)..(8): Ser or Phospho-Ser
  MOD_RES (10)..(10): Modified Cys
  See specification as filed for detailed description of substitutions and preferred embodiments
AVSDSLPSNCLKKSS

SEQ ID NO: 1374 - protein, 9 aa, Artificial Sequence
  Description of Artificial Sequence: Synthetic peptide
  N-term H or Acetyl
  MOD_RES (1)..(1): Modified Cys
  MOD_RES (2)..(2): Leu or Nle (i.e. isomer of Leucine)
  MOD_RES (3)..(3): Ser or Phospho-Ser
  See specification as filed for detailed description of substitutions and preferred embodiments
CLSLRRKAK

SEQ ID NO: 1375 - protein, 9 aa, Artificial Sequence
  Description of Artificial Sequence: Synthetic peptide
  N-term H or Acetyl
  MOD_RES (1)..(1): Modified Cys
  MOD_RES (3)..(3): Ser or Phospho-Ser
  See specification as filed for detailed description of substitutions and preferred embodiments
CASLRRKAK

SEQ ID NO: 1376 - protein, 9 aa, Artificial Sequence
  Description of Artificial Sequence: Synthetic peptide
  N-term H or Acetyl
  MOD_RES (1)..(1): Modified Cys
  MOD_RES (3)..(3): Ser or Phospho-Ser
  See specification as filed for detailed description of substitutions and preferred embodiments
CDSLRRKAK

SEQ ID NO: 1377 - protein, 9 aa, Artificial Sequence
  Description of Artificial Sequence: Synthetic peptide
  N-term H or Acetyl
  MOD_RES (1)..(1): Modified Cys
  MOD_RES (3)..(3): Ser or Phospho-Ser
  See specification as filed for detailed description of substitutions and preferred embodiments
CESLRRKAK

SEQ ID NO: 1378 - protein, 13 aa, Artificial Sequence
  Description of Artificial Sequence: Synthetic peptide
  N-term H or Acetyl
  MOD_RES (1)..(1): Modified Cys
  MOD_RES (3)..(3): Ser or Phospho-Ser
  See specification as filed for detailed description of substitutions and preferred embodiments
CESQEAFADLWKK

SEQ ID NO: 1379 - protein, 13 aa, Artificial Sequence
  Description of Artificial Sequence: Synthetic peptide
  N-term H or Acetyl
  MOD_RES (1)..(1): Modified Cys
  MOD_RES (3)..(3): Ser or Phospho-Ser
  See specification as filed for detailed description of substitutions and preferred embodiments
CESQETFSDLWKK

SEQ ID NO: 1380 - protein, 9 aa, Artificial Sequence
  Description of Artificial Sequence: Synthetic peptide
  N-term H or Acetyl
  MOD_RES (1)..(1): Modified Cys
  MOD_RES (3)..(3): Ser or Phospho-Ser
  MOD_RES (4)..(4): Leu or Nle (i.e. isomer of Leucine)
  See specification as filed for detailed description of substitutions and preferred embodiments
CFSLRRKAK

SEQ ID NO: 1381 - protein, 9 aa, Artificial Sequence
  Description of Artificial Sequence: Synthetic peptide
  N-term H or Acetyl
  MOD_RES (1)..(1): Modified Cys
  MOD_RES (3)..(3): Ser or Phospho-Ser
  See specification as filed for detailed description of substitutions and preferred embodiments
CFSARRKAK

SEQ ID NO: 1382 - protein, 9 aa, Artificial Sequence
  Description of Artificial Sequence: Synthetic peptide
  N-term H or Acetyl
  MOD_RES (1)..(1): Modified Cys
  MOD_RES (3)..(3): Ser or Phospho-Ser
  See specification as filed for detailed description of substitutions and preferred embodiments
CFSDRRKAK

SEQ ID NO: 1383 - protein, 9 aa, Artificial Sequence
  Description of Artificial Sequence: Synthetic peptide
  N-term H or Acetyl
  MOD_RES (1)..(1): Modified Cys
  MOD_RES (3)..(3): Ser or Phospho-Ser
  See specification as filed for detailed description of substitutions and preferred embodiments
CFSERRKAK

SEQ ID NO: 1384 - protein, 9 aa, Artificial Sequence
  Description of Artificial Sequence: Synthetic peptide
  N-term H or Acetyl
  MOD_RES (1)..(1): Modified Cys
  MOD_RES (3)..(3): Ser or Phospho-Ser
  See specification as filed for detailed description of substitutions and preferred embodiments
CFSFRRKAK

SEQ ID NO: 1385 - protein, 9 aa, Artificial Sequence
  Description of Artificial Sequence: Synthetic peptide
  N-term H or Acetyl
  MOD_RES (1)..(1): Modified Cys
  MOD_RES (3)..(3): Ser or Phospho-Ser
  See specification as filed for detailed description of substitutions and preferred embodiments
CFSGRRKAK

SEQ ID NO: 1386 - protein, 9 aa, Artificial Sequence
  Description of Artificial Sequence: Synthetic peptide
  N-term H or Acetyl
  MOD_RES (1)..(1): Modified Cys
  MOD_RES (3)..(3): Ser or Phospho-Ser
  See specification as filed for detailed description of substitutions and preferred embodiments
CFSHRRKAK

SEQ ID NO: 1387 - protein, 9 aa, Artificial Sequence
  Description of Artificial Sequence: Synthetic peptide
  N-term H or Acetyl
  MOD_RES (1)..(1): Modified Cys
  MOD_RES (3)..(3): Ser or Phospho-Ser
  See specification as filed for detailed description of substitutions and preferred embodiments
CFSIRRKAK

SEQ ID NO: 1388 - protein, 9 aa, Artificial Sequence
  Description of Artificial Sequence: Synthetic peptide
  N-term H or Acetyl
  MOD_RES (1)..(1): Modified Cys
  MOD_RES (3)..(3): Ser or Phospho-Ser
  See specification as filed for detailed description of substitutions and preferred embodiments
CFSKRRKAK

SEQ ID NO: 1389 - protein, 9 aa, Artificial Sequence
  Description of Artificial Sequence: Synthetic peptide
  N-term H or Acetyl
  MOD_RES (1)..(1): Modified Cys
  MOD_RES (3)..(3): Ser or Phospho-Ser
  MOD_RES (5)..(5): Leu or Nle (i.e. isomer of Leucine)
  See specification as filed for detailed description of substitutions and preferred embodiments
CFSLLRKAK

SEQ ID NO: 1390 - protein, 9 aa, Artificial Sequence
  Description of Artificial Sequence: Synthetic peptide
  N-term H or Acetyl
  MOD_RES (1)..(1): Modified Cys
  MOD_RES (3)..(3): Ser or Phospho-Ser
  See specification as filed for detailed description of substitutions and preferred embodiments
CFSLARKAK

SEQ ID NO: 1391 - protein, 9 aa, Artificial Sequence
  Description of Artificial Sequence: Synthetic peptide
  N-term H or Acetyl
  MOD_RES (1)..(1): Modified Cys
  MOD_RES (3)..(3): Ser or Phospho-Ser
  See specification as filed for detailed description of substitutions and preferred embodiments
CFSLDRKAK

SEQ ID NO: 1392 - protein, 9 aa, Artificial Sequence
  Description of Artificial Sequence: Synthetic peptide
  N-term H or Acetyl
  MOD_RES (1)..(1): Modified Cys
  MOD_RES (3)..(3): Ser or Phospho-Ser
  See specification as filed for detailed description of substitutions and preferred embodiments
CFSLERKAK

SEQ ID NO: 1393 - protein, 9 aa, Artificial Sequence
  Description of Artificial Sequence: Synthetic peptide
  N-term H or Acetyl
  MOD_RES (1)..(1): Modified Cys
  MOD_RES (3)..(3): Ser or Phospho-Ser
  See specification as filed for detailed description of substitutions and preferred embodiments
CFSLFRKAK

SEQ ID NO: 1394 - protein, 9 aa, Artificial Sequence
  Description of Artificial Sequence: Synthetic peptide
  N-term H or Acetyl
  MOD_RES (1)..(1): Modified Cys
  MOD_RES (3)..(3): Ser or Phospho-Ser
  See specification as filed for detailed description of substitutions and preferred embodiments
CFSLGRKAK

SEQ ID NO: 1395 - protein, 9 aa, Artificial Sequence
  Description of Artificial Sequence: Synthetic peptide
  N-term H or Acetyl
  MOD_RES (1)..(1): Modified Cys
  MOD_RES (3)..(3): Ser or Phospho-Ser
  See specification as filed for detailed description of substitutions and preferred embodiments
CFSLHRKAK

SEQ ID NO: 1396 - protein, 9 aa, Artificial Sequence
  Description of Artificial Sequence: Synthetic peptide
  N-term H or Acetyl
  MOD_RES (1)..(1): Modified Cys
  MOD_RES (3)..(3): Ser or Phospho-Ser
  See specification as filed for detailed description of substitutions and preferred embodiments
CFSLIRKAK

SEQ ID NO: 1397 - protein, 9 aa, Artificial Sequence
  Description of Artificial Sequence: Synthetic peptide
  N-term H or Acetyl
  MOD_RES (1)..(1): Modified Cys
  MOD_RES (3)..(3): Ser or Phospho-Ser
  See specification as filed for detailed description of substitutions and preferred embodiments
CFSLKRKAK

SEQ ID NO: 1398 - protein, 9 aa, Artificial Sequence
  Description of Artificial Sequence: Synthetic peptide
  N-term H or Acetyl
  MOD_RES (1)..(1): Modified Cys
  MOD_RES (3)..(3): Ser or Phospho-Ser
  See specification as filed for detailed description of substitutions and preferred embodiments
CFSLLRKAK

SEQ ID NO: 1399 - protein, 9 aa, Artificial Sequence
  Description of Artificial Sequence: Synthetic peptide
  N-term H or Acetyl
  MOD_RES (1)..(1): Modified Cys
  MOD_RES (3)..(3): Ser or Phospho-Ser
  See specification as filed for detailed description of substitutions and preferred embodiments
CFSLNRKAK

SEQ ID NO: 1400 - protein, 9 aa, Artificial Sequence
  Description of Artificial Sequence: Synthetic peptide
  N-term H or Acetyl
  MOD_RES (1)..(1): Modified Cys
  MOD_RES (3)..(3): Ser or Phospho-Ser
  See specification as filed for detailed description of substitutions and preferred embodiments
CFSLPRGAK

SEQ ID NO: 1401 - protein, 9 aa, Artificial Sequence
  Description of Artificial Sequence: Synthetic peptide
  N-term H or Acetyl
  MOD_RES (1)..(1): Modified Cys
  MOD_RES (3)..(3): Ser or Phospho-Ser
  See specification as filed for detailed description of substitutions and preferred embodiments
CFSLPRKAK

SEQ ID NO: 1402 - protein, 9 aa, Artificial Sequence
  Description of Artificial Sequence: Synthetic peptide
  N-term H or Acetyl
  MOD_RES (1)..(1): Modified Cys
  MOD_RES (3)..(3): Ser or Phospho-Ser
  See specification as filed for detailed description of substitutions and preferred embodiments
CFSLQRKAK

SEQ ID NO: 1403 - protein, 9 aa, Artificial Sequence
  Description of Artificial Sequence: Synthetic peptide
  N-term H or Acetyl
  MOD_RES (1)..(1): Modified Cys
  MOD_RES (3)..(3): Ser or Phospho-Ser
  MOD_RES (6)..(6): Leu or Nle (i.e. isomer of Leucine)
  See specification as filed for detailed description of substitutions and preferred embodiments
CFSLRLKAK

SEQ ID NO: 1404 - protein, 9 aa, Artificial Sequence
  Description of Artificial Sequence: Synthetic peptide
  N-term H or Acetyl
  MOD_RES (1)..(1): Modified Cys
  MOD_RES (3)..(3): Ser or Phospho-Ser
  See specification as filed for detailed description of substitutions and preferred embodiments
CFSLRAKAK

SEQ ID NO: 1405 - protein, 9 aa, Artificial Sequence
  Description of Artificial Sequence: Synthetic peptide
  N-term H or Acetyl
  MOD_RES (1)..(1): Modified Cys
  MOD_RES (3)..(3): Ser or Phospho-Ser
  See specification as filed for detailed description of substitutions and preferred embodiments
CFSLRDKAK

SEQ ID NO: 1406 - protein, 9 aa, Artificial Sequence
  Description of Artificial Sequence: Synthetic peptide
  N-term H or Acetyl
  MOD_RES (1)..(1): Modified Cys
  MOD_RES (3)..(3): Ser or Phospho-Ser
  See specification as filed for detailed description of substitutions and preferred embodiments
CFSLREKAK

SEQ ID NO: 1407 - protein, 9 aa, Artificial Sequence
  Description of Artificial Sequence: Synthetic peptide
  N-term H or Acetyl
  MOD_RES (1)..(1): Modified Cys
  MOD_RES (3)..(3): Ser or Phospho-Ser
  See specification as filed for detailed description of substitutions and preferred embodiments
CFSLRFKAK

SEQ ID NO: 1408 - protein, 9 aa, Artificial Sequence
  Description of Artificial Sequence: Synthetic peptide
  N-term H or Acetyl
  MOD_RES (1)..(1): Modified Cys
  MOD_RES (3)..(3): Ser or Phospho-Ser
  See specification as filed for detailed description of substitutions and preferred embodiments
CFSLRGKAK

SEQ ID NO: 1409 - protein, 9 aa, Artificial Sequence
  Description of Artificial Sequence: Synthetic peptide
  N-term H or Acetyl
  MOD_RES (1)..(1): Modified Cys
  MOD_RES (3)..(3): Ser or Phospho-Ser
  See specification as filed for detailed description of substitutions and preferred embodiments
CFSLRHKAK

SEQ ID NO: 1410 - protein, 9 aa, Artificial Sequence
  Description of Artificial Sequence: Synthetic peptide
  N-term H or Acetyl
  MOD_RES (1)..(1): Modified Cys
  MOD_RES (3)..(3): Ser or Phospho-Ser
  See specification as filed for detailed description of substitutions and preferred embodiments
CFSLRIKAK

SEQ ID NO: 1411 - protein, 9 aa, Artificial Sequence
  Description of Artificial Sequence: Synthetic peptide
  N-term H or Acetyl
  MOD_RES (1)..(1): Modified Cys
  MOD_RES (3)..(3): Ser or Phospho-Ser
  See specification as filed for detailed description of substitutions and preferred embodiments
CFSLRKKAK

SEQ ID NO: 1412 - protein, 9 aa, Artificial Sequence
  Description of Artificial Sequence: Synthetic peptide
  N-term H or Acetyl
  MOD_RES (1)..(1): Modified Cys
  MOD_RES (3)..(3): Ser or Phospho-Ser
  See specification as filed for detailed description of substitutions and preferred embodiments
CFSLRLKAK

SEQ ID NO: 1413 - protein, 9 aa, Artificial Sequence
  Description of Artificial Sequence: Synthetic peptide
  N-term H or Acetyl
  MOD_RES (1)..(1): Modified Cys
  MOD_RES (3)..(3): Ser or Phospho-Ser
  See specification as filed for detailed description of substitutions and preferred embodiments
CFSLRNKAK

SEQ ID NO: 1414 - protein, 9 aa, Artificial Sequence
  Description of Artificial Sequence: Synthetic peptide
  N-term H or Acetyl
  MOD_RES (1)..(1): Modified Cys
  MOD_RES (3)..(3): Ser or Phospho-Ser
  See specification as filed for detailed description of substitutions and preferred embodiments
CFSLRPKAK

SEQ ID NO: 1415 - protein, 9 aa, Artificial Sequence
  Description of Artificial Sequence: Synthetic peptide
  N-term H or Acetyl
  MOD_RES (1)..(1): Modified Cys
  MOD_RES (3)..(3): Ser or Phospho-Ser
  See specification as filed for detailed description of substitutions and preferred embodiments
CFSLRQKAK

SEQ ID NO: 1416 - protein, 9 aa, Artificial Sequence
  Description of Artificial Sequence: Synthetic peptide
  N-term H or Acetyl
  MOD_RES (1)..(1): Modified Cys
  MOD_RES (3)..(3): Ser or Phospho-Ser
  MOD_RES (7)..(7): Leu or Nle (i.e. isomer of Leucine)
  See specification as filed for detailed description of substitutions and preferred embodiments
CFSLRRLAK

SEQ ID NO: 1417 - protein, 9 aa, Artificial Sequence
  Description of Artificial Sequence: Synthetic peptide
  N-term H or Acetyl
  MOD_RES (1)..(1): Modified Cys
  MOD_RES (3)..(3): Ser or Phospho-Ser
  See specification as filed for detailed description of substitutions and preferred embodiments
CFSLRRAAK

SEQ ID NO: 1418 - protein, 9 aa, Artificial Sequence
  Description of Artificial Sequence: Synthetic peptide
  N-term H or Acetyl
  MOD_RES (1)..(1): Modified Cys
  MOD_RES (3)..(3): Ser or Phospho-Ser
  See specification as filed for detailed description of substitutions and preferred embodiments
CFSLRRDAK

SEQ ID NO: 1419 - protein, 9 aa, Artificial Sequence
  Description of Artificial Sequence: Synthetic peptide
  N-term H or Acetyl
  MOD_RES (1)..(1): Modified Cys
  MOD_RES (3)..(3): Ser or Phospho-Ser
  See specification as filed for detailed description of substitutions and preferred embodiments
CFSLRREAK

SEQ ID NO: 1420 - protein, 9 aa, Artificial Sequence
  Description of Artificial Sequence: Synthetic peptide
  N-term H or Acetyl
  MOD_RES (1)..(1): Modified Cys
  MOD_RES (3)..(3): Ser or Phospho-Ser
  See specification as filed for detailed description of substitutions and preferred embodiments
CFSLRRFAK

SEQ ID NO: 1421 - protein, 9 aa, Artificial Sequence
  Description of Artificial Sequence: Synthetic peptide
  N-term H or Acetyl
  MOD_RES (1)..(1): Modified Cys
  MOD_RES (3)..(3): Ser or Phospho-Ser
  See specification as filed for detailed description of substitutions and preferred embodiments
CFSLRRGAK

SEQ ID NO: 1422 - protein, 9 aa, Artificial Sequence
  Description of Artificial Sequence: Synthetic peptide
  N-term H or Acetyl
  MOD_RES (1)..(1): Modified Cys
  MOD_RES (3)..(3): Ser or Phospho-Ser
  See specification as filed for detailed description of substitutions and preferred embodiments
CFSLRRHAK

SEQ ID NO: 1423 - protein, 9 aa, Artificial Sequence
  Description of Artificial Sequence: Synthetic peptide
  N-term H or Acetyl
  MOD_RES (1)..(1): Modified Cys
  MOD_RES (3)..(3): Ser or Phospho-Ser
  See specification as filed for detailed description of substitutions and preferred embodiments
CFSLRRIAK

SEQ ID NO: 1424 - protein, 9 aa, Artificial Sequence
  Description of Artificial Sequence: Synthetic peptide
  N-term H or Acetyl
  MOD_RES (1)..(1): Modified Cys
  MOD_RES (3)..(3): Ser or Phospho-Ser
  MOD_RES (8)..(8): Leu or Nle (i.e. isomer of Leucine)
  See specification as filed for detailed description of substitutions and preferred embodiments
CFSLRRKLK

SEQ ID NO: 1425 - protein, 9 aa, Artificial Sequence
  Description of Artificial Sequence: Synthetic peptide
  N-term H or Acetyl
  MOD_RES (1)..(1): Modified Cys
  MOD_RES (3)..(3): Ser or Phospho-Ser
  MOD_RES (9)..(9): Leu or Nle (i.e. isomer of Leucine)
  See specification as filed for detailed description of substitutions and preferred embodiments
CFSLRRKAL

SEQ ID NO: 1426 - protein, 9 aa, Artificial Sequence
  Description of Artificial Sequence: Synthetic peptide
  N-term H or Acetyl
  MOD_RES (1)..(1): Modified Cys
  MOD_RES (3)..(3): Ser or Phospho-Ser
  See specification as filed for detailed description of substitutions and preferred embodiments
CFSLRRKAA

SEQ ID NO: 1427 - protein, 9 aa, Artificial Sequence
  Description of Artificial Sequence: Synthetic peptide
  N-term H or Acetyl
  MOD_RES (1)..(1): Modified Cys
  MOD_RES (3)..(3): Ser or Phospho-Ser
  See specification as filed for detailed description of substitutions and preferred embodiments
CFSLRRKAD

SEQ ID NO: 1428 - protein, 9 aa, Artificial Sequence
  Description of Artificial Sequence: Synthetic peptide
  N-term H or Acetyl
  MOD_RES (1)..(1): Modified Cys
  MOD_RES (3)..(3): Ser or Phospho-Ser
  See specification as filed for detailed description of substitutions and preferred embodiments
CFSLRRKAE

SEQ ID NO: 1429 - protein, 9 aa, Artificial Sequence
  Description of Artificial Sequence: Synthetic peptide
  N-term H or Acetyl
  MOD_RES (1)..(1): Modified Cys
  MOD_RES (3)..(3): Ser or Phospho-Ser
  See specification as filed for detailed description of substitutions and preferred embodiments
CFSLRRKAF

SEQ ID NO: 1430 - protein, 9 aa, Artificial Sequence
  Description of Artificial Sequence: Synthetic peptide
  N-term H or Acetyl
  MOD_RES (1)..(1): Modified Cys
  MOD_RES (3)..(3): Ser or Phospho-Ser
  See specification as filed for detailed description of substitutions and preferred embodiments
CFSLRRKAG

SEQ ID NO: 1431 - protein, 9 aa, Artificial Sequence
  Description of Artificial Sequence: Synthetic peptide
  N-term H or Acetyl
  MOD_RES (1)..(1): Modified Cys
  MOD_RES (3)..(3): Ser or Phospho-Ser
  See specification as filed for detailed description of substitutions and preferred embodiments
CFSLRRKAH

SEQ ID NO: 1432 - protein, 9 aa, Artificial Sequence
  Description of Artificial Sequence: Synthetic peptide
  N-term H or Acetyl
  MOD_RES (1)..(1): Modified Cys
  MOD_RES (3)..(3): Ser or Phospho-Ser
  See specification as filed for detailed description of substitutions and preferred embodiments
CFSLRRKAI

SEQ ID NO: 1433 - protein, 9 aa, Artificial Sequence
  Description of Artificial Sequence: Synthetic peptide
  N-term H or Acetyl
  MOD_RES (1)..(1): Modified Cys
  MOD_RES (3)..(3): Ser or Phospho-Ser
  See specification as filed for detailed description of substitutions and preferred embodiments
CFSLRRKAL

SEQ ID NO: 1434 - protein, 9 aa, Artificial Sequence
  Description of Artificial Sequence: Synthetic peptide
  N-term H or Acetyl
  MOD_RES (1)..(1): Modified Cys
  MOD_RES (3)..(3): Ser or Phospho-Ser
  See specification as filed for detailed description of substitutions and preferred embodiments
CFSLRRKAN

SEQ ID NO: 1435 - protein, 9 aa, Artificial Sequence
  Description of Artificial Sequence: Synthetic peptide
  N-term H or Acetyl
  MOD_RES (1)..(1): Modified Cys
  MOD_RES (3)..(3): Ser or Phospho-Ser
  See specification as filed for detailed description of substitutions and preferred embodiments
CFSLRRKAP

SEQ ID NO: 1436 - protein, 9 aa, Artificial Sequence
  Description of Artificial Sequence: Synthetic peptide
  N-term H or Acetyl
  MOD_RES (1)..(1): Modified Cys
  MOD_RES (3)..(3): Ser or Phospho-Ser
  See specification as filed for detailed description of substitutions and preferred embodiments
CFSLRRKAQ

SEQ ID NO: 1437 - protein, 9 aa, Artificial Sequence
  Description of Artificial Sequence: Synthetic peptide
  N-term H or Acetyl
  MOD_RES (1)..(1): Modified Cys
  MOD_RES (3)..(3): Ser or Phospho-Ser
  See specification as filed for detailed description of substitutions and preferred embodiments
CFSLRRKAR

SEQ ID NO: 1438 - protein, 9 aa, Artificial Sequence
  Description of Artificial Sequence: Synthetic peptide
  N-term H or Acetyl
  MOD_RES (1)..(1): Modified Cys
  MOD_RES (3)..(3): Ser or Phospho-Ser
  See specification as filed for detailed description of substitutions and preferred embodiments
CFSLRRKAV

SEQ ID NO: 1439 - protein, 9 aa, Artificial Sequence
  Description of Artificial Sequence: Synthetic peptide
  N-term H or Acetyl
  MOD_RES (1)..(1): Modified Cys
  MOD_RES (3)..(3): Ser or Phospho-Ser
  See specification as filed for detailed description of substitutions and preferred embodiments
CFSLRRKAW

SEQ ID NO: 1440 - protein, 9 aa, Artificial Sequence
  Description of Artificial Sequence: Synthetic peptide
  N-term H or Acetyl
  MOD_RES (1)..(1): Modified Cys
  MOD_RES (3)..(3): Ser or Phospho-Ser
  See specification as filed for detailed description of substitutions and preferred embodiments
CFSLRRKDK

SEQ ID NO: 1441 - protein, 9 aa, Artificial Sequence
  Description of Artificial Sequence: Synthetic peptide
  N-term H or Acetyl
  MOD_RES (1)..(1): Modified Cys
  MOD_RES (3)..(3): Ser or Phospho-Ser
  See specification as filed for detailed description of substitutions and preferred embodiments
CFSLRRKEK

SEQ ID NO: 1442 - protein, 9 aa, Artificial Sequence
  Description of Artificial Sequence: Synthetic peptide
  N-term H or Acetyl
  MOD_RES (1)..(1): Modified Cys
  MOD_RES (3)..(3): Ser or Phospho-Ser
  See specification as filed for detailed description of substitutions and preferred embodiments
CFSLRRKFK

SEQ ID NO: 1443 - protein, 9 aa, Artificial Sequence
  Description of Artificial Sequence: Synthetic peptide
  N-term H or Acetyl
  MOD_RES (1)..(1): Modified Cys
  MOD_RES (3)..(3): Ser or Phospho-Ser
  See specification as filed for detailed description of substitutions and preferred embodiments
CFSLRRKGK

SEQ ID NO: 1444 - protein, 9 aa, Artificial Sequence
  Description of Artificial Sequence: Synthetic peptide
  N-term H or Acetyl
  MOD_RES (1)..(1): Modified Cys
  MOD_RES (3)..(3): Ser or Phospho-Ser
  See specification as filed for detailed description of substitutions and preferred embodiments
CFSLRRKHK

SEQ ID NO: 1445 - protein, 9 aa, Artificial Sequence
  Description of Artificial Sequence: Synthetic peptide
  N-term H or Acetyl
  MOD_RES (1)..(1): Modified Cys
  MOD_RES (3)..(3): Ser or Phospho-Ser
  See specification as filed for detailed description of substitutions and preferred embodiments
CFSLRRKIK

SEQ ID NO: 1446 - protein, 9 aa, Artificial Sequence
  Description of Artificial Sequence: Synthetic peptide
  N-term H or Acetyl
  MOD_RES (1)..(1): Modified Cys
  MOD_RES (3)..(3): Ser or Phospho-Ser
  See specification as filed for detailed description of substitutions and preferred embodiments
CFSLRRKKK

SEQ ID NO: 1447 - protein, 9 aa, Artificial Sequence
  Description of Artificial Sequence: Synthetic peptide
  N-term H or Acetyl
  MOD_RES (1)..(1): Modified Cys
  MOD_RES (3)..(3): Ser or Phospho-Ser
  See specification as filed for detailed description of substitutions and preferred embodiments
CFSLRRKLK

SEQ ID NO: 1448 - protein, 9 aa, Artificial Sequence
  Description of Artificial Sequence: Synthetic peptide
  N-term H or Acetyl
  MOD_RES (1)..(1): Modified Cys
  MOD_RES (3)..(3): Ser or Phospho-Ser
  See specification as filed for detailed description of substitutions and preferred embodiments
CFSLRRKNK

SEQ ID NO: 1449 - protein, 9 aa, Artificial Sequence
  Description of Artificial Sequence: Synthetic peptide
  N-term H or Acetyl
  MOD_RES (1)..(1): Modified Cys
  MOD_RES (3)..(3): Ser or Phospho-Ser
  See specification as filed for detailed description of substitutions and preferred embodiments
CFSLRRKPK

SEQ ID NO: 1450 - protein, 9 aa, Artificial Sequence
  Description of Artificial Sequence: Synthetic peptide
  N-term H or Acetyl
  MOD_RES (1)..(1): Modified Cys
  MOD_RES (3)..(3): Ser or Phospho-Ser
  See specification as filed for detailed description of substitutions and preferred embodiments
CFSLRRKQK

SEQ ID NO: 1451 - protein, 9 aa, Artificial Sequence
  Description of Artificial Sequence: Synthetic peptide
  N-term H or Acetyl
  MOD_RES (1)..(1): Modified Cys
  MOD_RES (3)..(3): Ser or Phospho-Ser
  See specification as filed for detailed description of substitutions and preferred embodiments
CFSLRRKRK

SEQ ID NO: 1452 - protein, 9 aa, Artificial Sequence
  Description of Artificial Sequence: Synthetic peptide
  N-term H or Acetyl
  MOD_RES (1)..(1): Modified Cys
  MOD_RES (3)..(3): Ser or Phospho-Ser
  See specification as filed for detailed description of substitutions and preferred embodiments
CFSLRRKVK

SEQ ID NO: 1453 - protein, 9 aa, Artificial Sequence
  Description of Artificial Sequence: Synthetic peptide
  N-term H or Acetyl
  MOD_RES (1)..(1): Modified Cys
  MOD_RES (3)..(3): Ser or Phospho-Ser
  See specification as filed for detailed description of substitutions and preferred embodiments
CFSLRRKWK

SEQ ID NO: 1454 - protein, 9 aa, Artificial Sequence
  Description of Artificial Sequence: Synthetic peptide
  N-term H or Acetyl
  MOD_RES (1)..(1): Modified Cys
  MOD_RES (3)..(3): Ser or Phospho-Ser
  See specification as filed for detailed description of substitutions and preferred embodiments
CFSLRRLAK

SEQ ID NO: 1455 - protein, 9 aa, Artificial Sequence
  Description of Artificial Sequence: Synthetic peptide
  N-term H or Acetyl
  MOD_RES (1)..(1): Modified Cys
  MOD_RES (3)..(3): Ser or Phospho-Ser
  See specification as filed for detailed description of substitutions and preferred embodiments
CFSLRRNAK

SEQ ID NO: 1456 - protein, 9 aa, Artificial Sequence
  Description of Artificial Sequence: Synthetic peptide
  N-term H or Acetyl
  MOD_RES (1)..(1): Modified Cys
  MOD_RES (3)..(3): Ser or Phospho-Ser
  See specification as filed for detailed description of substitutions and preferred embodiments
CFSLRRPAK

SEQ ID NO: 1457 - protein, 9 aa, Artificial Sequence
  Description of Artificial Sequence: Synthetic peptide
  N-term H or Acetyl
  MOD_RES (1)..(1): Modified Cys
  MOD_RES (3)..(3): Ser or Phospho-Ser
  See specification as filed for detailed description of substitutions and preferred embodiments
CFSLRRQAK

SEQ ID NO: 1458 - protein, 9 aa, Artificial Sequence
  Description of Artificial Sequence: Synthetic peptide
  N-term H or Acetyl
  MOD_RES (1)..(1): Modified Cys
  MOD_RES (3)..(3): Ser or Phospho-Ser
  See specification as filed for detailed description of substitutions and preferred embodiments
CFSLRRRAK

SEQ ID NO: 1459 - protein, 9 aa, Artificial Sequence
  Description of Artificial Sequence: Synthetic peptide
  N-term H or Acetyl
  MOD_RES (1)..(1): Modified Cys
  MOD_RES (3)..(3): Ser or Phospho-Ser
  See specification as filed for detailed description of substitutions and preferred embodiments
CFSLRRVAK

SEQ ID NO: 1460 - protein, 9 aa, Artificial Sequence
  Description of Artificial Sequence: Synthetic peptide
  N-term H or Acetyl
  MOD_RES (1)..(1): Modified Cys
  MOD_RES (3)..(3): Ser or Phospho-Ser
  See specification as filed for detailed description of substitutions and preferred embodiments
CFSLRRWAK

SEQ ID NO: 1461 - protein, 9 aa, Artificial Sequence
  Description of Artificial Sequence: Synthetic peptide
  N-term H or Acetyl
  MOD_RES (1)..(1): Modified Cys
  MOD_RES (3)..(3): Ser or Phospho-Ser
  See specification as filed for detailed description of substitutions and preferred embodiments
CFSLRVKAK

SEQ ID NO: 1462 - protein, 9 aa, Artificial Sequence
  Description of Artificial Sequence: Synthetic peptide
  N-term H or Acetyl
  MOD_RES (1)..(1): Modified Cys
  MOD_RES (3)..(3): Ser or Phospho-Ser
  See specification as filed for detailed description of substitutions and preferred embodiments
CFSLRWKAK

SEQ ID NO: 1463 - protein, 9 aa, Artificial Sequence
  Description of Artificial Sequence: Synthetic peptide
  N-term H or Acetyl
  MOD_RES (1)..(1): Modified Cys
  MOD_RES (3)..(3): Ser or Phospho-Ser
  See specification as filed for detailed description of substitutions and preferred embodiments
CFSLVRKAK

SEQ ID NO: 1464 - protein, 9 aa, Artificial Sequence
  Description of Artificial Sequence: Synthetic peptide
  N-term H or Acetyl
  MOD_RES (1)..(1): Modified Cys
  MOD_RES (3)..(3): Ser or Phospho-Ser
  See specification as filed for detailed description of substitutions and preferred embodiments
CFSLWRKAK

SEQ ID NO: 1465 - protein, 9 aa, Artificial Sequence
  Description of Artificial Sequence: Synthetic peptide
  N-term H or Acetyl
  MOD_RES (1)..(1): Modified Cys
  MOD_RES (3)..(3): Ser or Phospho-Ser
  See specification as filed for detailed description of substitutions and preferred embodiments
CFSNRRKAK

SEQ ID NO: 1466 - protein, 9 aa, Artificial Sequence
  Description of Artificial Sequence: Synthetic peptide
  N-term H or Acetyl
  MOD_RES (1)..(1): Modified Cys
  MOD_RES (3)..(3): Ser or Phospho-Ser
  See specification as filed for detailed description of substitutions and preferred embodiments
CFSPRRKAK

SEQ ID NO: 1467 - protein, 9 aa, Artificial Sequence
  Description of Artificial Sequence: Synthetic peptide
  N-term H or Acetyl
  MOD_RES (1)..(1): Modified Cys
  MOD_RES (3)..(3): Ser or Phospho-Ser
  See specification as filed for detailed description of substitutions and preferred embodiments
CFSQRRKAK

SEQ ID NO: 1468 - protein, 9 aa, Artificial Sequence
  Description of Artificial Sequence: Synthetic peptide
  N-term H or Acetyl
  MOD_RES (1)..(1): Modified Cys
  MOD_RES (3)..(3): Ser or Phospho-Ser
  See specification as filed for detailed description of substitutions and preferred embodiments
CFSRRRKAK

SEQ ID NO: 1469 - protein, 9 aa, Artificial Sequence
  Description of Artificial Sequence: Synthetic peptide
  N-term H or Acetyl
  MOD_RES (1)..(1): Modified Cys
  MOD_RES (3)..(3): Ser or Phospho-Ser
  See specification as filed for detailed description of substitutions and preferred embodiments
CFSVRRKAK

SEQ ID NO: 1470 - protein, 9 aa, Artificial Sequence
  Description of Artificial Sequence: Synthetic peptide
  N-term H or Acetyl
  MOD_RES (1)..(1): Modified Cys
  MOD_RES (3)..(3): Ser or Phospho-Ser
  See specification as filed for detailed description of substitutions and preferred embodiments
CFSWRRKAK

SEQ ID NO: 1471 - protein, 9 aa, Artificial Sequence
  Description of Artificial Sequence: Synthetic peptide
  N-term H or Acetyl
  MOD_RES (1)..(1): Modified Cys
  MOD_RES (3)..(3): Ser or Phospho-Ser
  See specification as filed for detailed description of substitutions and preferred embodiments
CGSLRRKAK

SEQ ID NO: 1472 - protein, 9 aa, Artificial Sequence
  Description of Artificial Sequence: Synthetic peptide
  N-term H or Acetyl
  MOD_RES (1)..(1): Modified Cys
  MOD_RES (3)..(3): Ser or Phospho-Ser
  See specification as filed for detailed description of substitutions and preferred embodiments
CHSLKRGNR

SEQ ID NO: 1473 - protein, 9 aa, Artificial Sequence
  Description of Artificial Sequence: Synthetic peptide
  N-term H or Acetyl
  MOD_RES (1)..(1): Modified Cys
  MOD_RES (3)..(3): Ser or Phospho-Ser
  See specification as filed for detailed description of substitutions and preferred embodiments
CHSLKRKNR

SEQ ID NO: 1474 - protein, 9 aa, Artificial Sequence
  Description of Artificial Sequence: Synthetic peptide
  N-term H or Acetyl
  MOD_RES (1)..(1): Modified Cys
  MOD_RES (3)..(3): Ser or Phospho-Ser
  See specification as filed for detailed description of substitutions and preferred embodiments
CHSLPRFNR

SEQ ID NO: 1475 - protein, 9 aa, Artificial Sequence
  Description of Artificial Sequence: Synthetic peptide
  N-term H or Acetyl
  MOD_RES (1)..(1): Modified Cys
  MOD_RES (3)..(3): Ser or Phospho-Ser
  See specification as filed for detailed description of substitutions and preferred embodiments
CHSLPRKNK

SEQ ID NO: 1476 - protein, 9 aa, Artificial Sequence
  Description of Artificial Sequence: Synthetic peptide
  N-term H or Acetyl
  MOD_RES (1)..(1): Modified Cys
  MOD_RES (3)..(3): Ser or Phospho-Ser
  See specification as filed for detailed description of substitutions and preferred embodiments
CHSLRRKAK

SEQ ID NO: 1477 - protein, 9 aa, Artificial Sequence
  Description of Artificial Sequence: Synthetic peptide
  N-term H or Acetyl
  MOD_RES (1)..(1): Modified Cys
  MOD_RES (3)..(3): Ser or Phospho-Ser
  See specification as filed for detailed description of substitutions and preferred embodiments
CISLRRKAK

SEQ ID NO: 1478 - protein, 9 aa, Artificial Sequence
  Description of Artificial Sequence: Synthetic peptide
  N-term H or Acetyl
  MOD_RES (1)..(1): Modified Cys
  MOD_RES (3)..(3): Ser or Phospho-Ser
  See specification as filed for detailed description of substitutions and preferred embodiments
CKSLRRKAK

SEQ ID NO: 1479 - protein, 14 aa, Artificial Sequence
  Description of Artificial Sequence: Synthetic peptide
  N-term H or Acetyl
  MOD_RES (1)..(1): Modified Cys
  MOD_RES (3)..(3): Ser or Phospho-Ser
  See specification as filed for detailed description of substitutions and preferred embodiments
CKSPAKEKAKSPEK

SEQ ID NO: 1480 - protein, 7 aa, Artificial Sequence
  Description of Artificial Sequence: Synthetic peptide
  N-term H or Acetyl
  MOD_RES (1)..(1): Modified Cys
  MOD_RES (3)..(3): Ser or Phospho-Ser
  See specification as filed for detailed description of substitutions and preferred embodiments
CLSFAEG

SEQ ID NO: 1481 - protein, 8 aa, Artificial Sequence
  Description of Artificial Sequence: Synthetic peptide
  N-term H or Acetyl
  MOD_RES (1)..(1): Modified Cys
  MOD_RES (3)..(3): Ser or Phospho-Ser
  See specification as filed for detailed description of substitutions and preferred embodiments
CLSFAEPG

SEQ ID NO: 1482 - protein, 7 aa, Artificial Sequence
  Description of Artificial Sequence: Synthetic peptide
  N-term H or Acetyl
  MOD_RES (1)..(1): Modified Cys
  MOD_RES (3)..(3): Ser or Phospho-Ser
  See specification as filed for detailed description of substitutions and preferred embodiments
CLSFRRR

SEQ ID NO: 1483 - protein, 9 aa, Artificial Sequence
  Description of Artificial Sequence: Synthetic peptide
  N-term H or Acetyl
  MOD_RES (1)..(1): Modified Cys
  MOD_RES (3)..(3): Ser or Phospho-Ser
  See specification as filed for detailed description of substitutions and preferred embodiments
CLSLRRKAK

SEQ ID NO: 1484 - protein, 13 aa, Artificial Sequence
  Description of Artificial Sequence: Synthetic peptide
  N-term H or Acetyl
  MOD_RES (1)..(1): Modified Cys
  MOD_RES (3)..(3): Ser or Phospho-Ser
  See specification as filed for detailed description of substitutions and preferred embodiments
CLSQEAFADLWKK

SEQ ID NO: 1485 - protein, 9 aa, Artificial Sequence
  Description of Artificial Sequence: Synthetic peptide
  N-term H or Acetyl
  MOD_RES (1)..(1): Modified Cys
  MOD_RES (3)..(3): Ser or Phospho-Ser
  See specification as filed for detailed description of substitutions and preferred embodiments
CNSLRRKAK

SEQ ID NO: 1486 - protein, 9 aa, Artificial Sequence
  Description of Artificial Sequence: Synthetic peptide
  N-term H or Acetyl
  MOD_RES (1)..(1): Modified Cys
  MOD_RES (3)..(3): Ser or Phospho-Ser
  See specification as filed for detailed description of substitutions and preferred embodiments
CPSLRRKAK

SEQ ID NO: 1487 - protein, 9 aa, Artificial Sequence
  Description of Artificial Sequence: Synthetic peptide
  N-term H or Acetyl
  MOD_RES (1)..(1): Modified Cys
  MOD_RES (3)..(3): Ser or Phospho-Ser
  See specification as filed for detailed description of substitutions and preferred embodiments
CQSLRRKAK

SEQ ID NO: 1488 - protein, 13 aa, Artificial Sequence
  Description of Artificial Sequence: Synthetic peptide
  N-term H or Acetyl
  MOD_RES (1)..(1): Modified Cys
  MOD_RES (3)..(3): Ser or Phospho-Ser
  See specification as filed for detailed description of substitutions and preferred embodiments
CQSQEAFADLWKK

SEQ ID NO: 1489 - protein, 13 aa, Artificial Sequence
  Description of Artificial Sequence: Synthetic peptide
  N-term H or Acetyl
  MOD_RES (1)..(1): Modified Cys
  MOD_RES (3)..(3): Ser or Phospho-Ser
  MOD_RES (8)..(8): Ser or Phospho-Ser
  See specification as filed for detailed description of substitutions and preferred embodiments
CQSQETFSDLWKK

SEQ ID NO: 1490 - protein, 9 aa, Artificial Sequence
  Description of Artificial Sequence: Synthetic peptide
  N-term H or Acetyl
  MOD_RES (1)..(1): Modified Cys
  MOD_RES (3)..(3): Ser or Phospho-Ser
  See specification as filed for detailed description of substitutions and preferred embodiments
CRSLRRKAK

SEQ ID NO: 1491 - protein, 18 aa, Artificial Sequence
  Description of Artificial Sequence: Synthetic peptide
  N-term H or Acetyl
  MOD_RES (1)..(1): Modified Cys
  MOD_RES (3)..(3): Thr or Phospho-Thr
  See specification as filed for detailed description of substitutions and preferred embodiments
CRTKQTARKSTGGKAPRK

SEQ ID NO: 1492 - protein, 14 aa, Artificial Sequence
  Description of Artificial Sequence: Synthetic peptide
  N-term H or Acetyl
  MOD_RES (1)..(1): Modified Cys
  MOD_RES (3)..(3): Thr or Phospho-Thr
  See specification as filed for detailed description of substitutions and preferred embodiments
CRTKQTARKSTGGK

SEQ ID NO: 1493 - protein, 9 aa, Artificial Sequence
  Description of Artificial Sequence: Synthetic peptide
  N-term H or Acetyl
  MOD_RES (1)..(1): Modified Cys
  MOD_RES (3)..(3): Ser or Phospho-Ser
  See specification as filed for detailed description of substitutions and preferred embodiments
CVSLRRKAK

SEQ ID NO: 1494 - protein, 9 aa, Artificial Sequence
  Description of Artificial Sequence: Synthetic peptide
  N-term H or Acetyl
  MOD_RES (1)..(1): Modified Cys
  MOD_RES (3)..(3): Ser or Phospho-Ser
  See specification as filed for detailed description of substitutions and preferred embodiments
CWSLRRKAK

SEQ ID NO: 1495 - protein, 20 aa, Artificial Sequence
  Description of Artificial Sequence: Synthetic peptide
  N-term H or Acetyl
  MOD_RES (2)..(2): Leu or Nle (i.e. isomer of Leucine)
  MOD_RES (8)..(8): Modified Cys
  MOD_RES (10)..(10): Thr or Phospho-Thr
  See specification as filed for detailed description of substitutions and preferred embodiments
DLNPLMACGTLTRRHQNGRF

SEQ ID NO: 1496 - protein, 20 aa, Artificial Sequence
  Description of Artificial Sequence: Synthetic peptide
  N-term H or Acetyl
  MOD_RES (3)..(3): Leu or Nle (i.e. isomer of Leucine)
  MOD_RES (8)..(8): Modified Cys
  MOD_RES (10)..(10): Thr or Phospho-Thr
  See specification as filed for detailed description of substitutions and preferred embodiments
DALPLMACGTLTRRHQNGRF

SEQ ID NO: 1497 - protein, 20 aa, Artificial Sequence
  Description of Artificial Sequence: Synthetic peptide
  N-term H or Acetyl
  MOD_RES (8)..(8): Modified Cys
  MOD_RES (10)..(10): Thr or Phospho-Thr
  See specification as filed for detailed description of substitutions and preferred embodiments
DAAPLMACGTLTRRHQNGRF

SEQ ID NO: 1498 - protein, 20 aa, Artificial Sequence
  Description of Artificial Sequence: Synthetic peptide
  N-term H or Acetyl
  MOD_RES (8)..(8): Modified Cys
  MOD_RES (10)..(10): Thr or Phospho-Thr
  See specification as filed for detailed description of substitutions and preferred embodiments
DADPLMACGTLTRRHQNGRF

SEQ ID NO: 1499 - protein, 15 aa, Artificial Sequence
  Description of Artificial Sequence: Synthetic peptide
  N-term H or Acetyl
  MOD_RES (8)..(8): Ser or Phospho-Ser
  MOD_RES (10)..(10): Modified Cys
  See specification as filed for detailed description of substitutions and preferred embodiments
DADRSILSPCGSSGP

SEQ ID NO: 1500 - protein, 15 aa, Artificial Sequence
  Description of Artificial Sequence: Synthetic peptide
  N-term H or Acetyl
  MOD_RES (10)..(10): Modified Cys
  MOD_RES (12)..(12): Ser or Phospho-Ser
  See specification as filed for detailed description of substitutions and preferred embodiments
DADRSILSPCGSSGP

SEQ ID NO: 1501 - protein, 20 aa, Artificial Sequence
  Description of Artificial Sequence: Synthetic peptide
  N-term H or Acetyl
  MOD_RES (8)..(8): Modified Cys
  MOD_RES (10)..(10): Thr or Phospho-Thr
  See specification as filed for detailed description of substitutions and preferred embodiments
DAEPLMACGTLTRRHQNGRF

SEQ ID NO: 1502 - protein, 20 aa, Artificial Sequence
  Description of Artificial Sequence: Synthetic peptide
  N-term H or Acetyl
  MOD_RES (8)..(8): Modified Cys
  MOD_RES (10)..(10): Thr or Phospho-Thr
  See specification as filed for detailed description of substitutions and preferred embodiments
DAFPLMACGTLTRRHQNGRF

SEQ ID NO: 1503 - protein, 20 aa, Artificial Sequence
  Description of Artificial Sequence: Synthetic peptide
  N-term H or Acetyl
  MOD_RES (8)..(8): Modified Cys
  MOD_RES (10)..(10): Thr or Phospho-Thr
  See specification as filed for detailed description of substitutions and preferred embodiments
DAGPLMACGTLTRRHQNGRF

SEQ ID NO: 1504 - protein, 20 aa, Artificial Sequence
  Description of Artificial Sequence: Synthetic peptide
  N-term H or Acetyl
  MOD_RES (8)..(8): Modified Cys
  MOD_RES (10)..(10): Thr or Phospho-Thr
  See specification as filed for detailed description of substitutions and preferred embodiments
DAHPLMACGTLTRRHQNGRF

SEQ ID NO: 1505 - protein, 20 aa, Artificial Sequence
  Description of Artificial Sequence: Synthetic peptide
  N-term H or Acetyl
  MOD_RES (8)..(8): Modified Cys
  MOD_RES (10)..(10): Thr or Phospho-Thr
  See specification as filed for detailed description of substitutions and preferred embodiments
DAIPLMACGTLTRRHQNGRF

SEQ ID NO: 1506 - protein, 20 aa, Artificial Sequence
  Description of Artificial Sequence: Synthetic peptide
  N-term H or Acetyl
  MOD_RES (8)..(8): Modified Cys
  MOD_RES (10)..(10): Thr or Phospho-Thr
  See specification as filed for detailed description of substitutions and preferred embodiments
DAKPLMACGTLTRRHQNGRF

SEQ ID NO: 1507 - protein, 18 aa, Artificial Sequence
  Description of Artificial Sequence: Synthetic peptide
  N-term H or Acetyl
  MOD_RES (14)..(14): Ser or Phospho-Ser
  MOD_RES (16)..(16): Modified Cys
  See specification as filed for detailed description of substitutions and preferred embodiments
DAKTTKKRPQRATSNCFS

SEQ ID NO: 1508 - protein, 18 aa, Artificial Sequence
  Description of Artificial Sequence: Synthetic peptide
  N-term H or Acetyl
  MOD_RES (16)..(16): Modified Cys
  MOD_RES (18)..(18): Ser or Phospho-Ser
  See specification as filed for detailed description of substitutions and preferred embodiments
DAKTTKKRPQRATSNCFS

SEQ ID NO: 1509 - protein, 20 aa, Artificial Sequence
  Description of Artificial Sequence: Synthetic peptide
  N-term H or Acetyl
  MOD_RES (8)..(8): Modified Cys
  MOD_RES (10)..(10): Thr or Phospho-Thr
  See specification as filed for detailed description of substitutions and preferred embodiments
DALPLMACGTLTRRHQNGRF

SEQ ID NO: 1510 - protein, 20 aa, Artificial Sequence
  Description of Artificial Sequence: Synthetic peptide
  N-term H or Acetyl
  MOD_RES (4)..(4): Leu or Nle (i.e. isomer of Leucine)
  MOD_RES (8)..(8): Modified Cys
  MOD_RES (10)..(10): Thr or Phospho-Thr
  See specification as filed for detailed description of substitutions and preferred embodiments
DANLLMACGTLTRRHQNGRF

SEQ ID NO: 1511 - protein, 20 aa, Artificial Sequence
  Description of Artificial Sequence: Synthetic peptide
  N-term H or Acetyl
  MOD_RES (8)..(8): Modified Cys
  MOD_RES (10)..(10): Thr or Phospho-Thr
  See specification as filed for detailed description of substitutions and preferred embodiments
DANALMACGTLTRRHQNGRF

SEQ ID NO: 1512 - protein, 20 aa, Artificial Sequence
  Description of Artificial Sequence: Synthetic peptide
  N-term H or Acetyl
  MOD_RES (8)..(8): Modified Cys
  MOD_RES (10)..(10): Thr or Phospho-Thr
  See specification as filed for detailed description of substitutions and preferred embodiments
DANDLMACGTLTRRHQNGRF

SEQ ID NO: 1513 - protein, 20 aa, Artificial Sequence
  Description of Artificial Sequence: Synthetic peptide
  N-term H or Acetyl
  MOD_RES (8)..(8): Modified Cys
  MOD_RES (10)..(10): Thr or Phospho-Thr
  See specification as filed for detailed description of substitutions and preferred embodiments
DANELMACGTLTRRHQNGRF

SEQ ID NO: 1514 - protein, 20 aa, Artificial Sequence
  Description of Artificial Sequence: Synthetic peptide
  N-term H or Acetyl
  MOD_RES (8)..(8): Modified Cys
  MOD_RES (10)..(10): Thr or Phospho-Thr
  See specification as filed for detailed description of substitutions and preferred embodiments
DANFLMACGTLTRRHQNGRF

SEQ ID NO: 1515 - protein, 20 aa, Artificial Sequence
  Description of Artificial Sequence: Synthetic peptide
  N-term H or Acetyl
  MOD_RES (8)..(8): Modified Cys
  MOD_RES (10)..(10): Thr or Phospho-Thr
  See specification as filed for detailed description of substitutions and preferred embodiments
DANGLMACGTLTRRHQNGRF

SEQ ID NO: 1516 - protein, 20 aa, Artificial Sequence
  Description of Artificial Sequence: Synthetic peptide
  N-term H or Acetyl
  MOD_RES (8)..(8): Modified Cys
  MOD_RES (10)..(10): Thr or Phospho-Thr
  See specification as filed for detailed description of substitutions and preferred embodiments
DANHLMACGTLTRRHQNGRF

SEQ ID NO: 1517 - protein, 20 aa, Artificial Sequence
  Description of Artificial Sequence: Synthetic peptide
  N-term H or Acetyl
  MOD_RES (8)..(8): Modified Cys
  MOD_RES (10)..(10): Thr or Phospho-Thr
  See specification as filed for detailed description of substitutions and preferred embodiments
DANILMACGTLTRRHQNGRF

SEQ ID NO: 1518 - protein, 20 aa, Artificial Sequence
  Description of Artificial Sequence: Synthetic peptide
  N-term H or Acetyl
  MOD_RES (8)..(8): Modified Cys
  MOD_RES (10)..(10): Thr or Phospho-Thr
  See specification as filed for detailed description of substitutions and preferred embodiments
DANKLMACGTLTRRHQNGRF

SEQ ID NO: 1519 - protein, 20 aa, Artificial Sequence
  Description of Artificial Sequence: Synthetic peptide
  N-term H or Acetyl
  MOD_RES (8)..(8): Modified Cys
  MOD_RES (10)..(10): Thr or Phospho-Thr
  See specification as filed for detailed description of substitutions and preferred embodiments
DANLLMACGTLTRRHQNGRF

SEQ ID NO: 1520 - protein, 20 aa, Artificial Sequence
  Description of Artificial Sequence: Synthetic peptide
  N-term H or Acetyl
  MOD_RES (8)..(8): Modified Cys
  MOD_RES (10)..(10): Thr or Phospho-Thr
  See specification as filed for detailed description of substitutions and preferred embodiments
DANNLMACGTLTRRHQNGRF

SEQ ID NO: 1521 - protein, 20 aa, Artificial Sequence
  Description of Artificial Sequence: Synthetic peptide
  N-term H or Acetyl
  MOD_RES (5)..(5): Leu or Nle (i.e. isomer of Leucine)
  MOD_RES (8)..(8): Modified Cys
  MOD_RES (10)..(10): Thr or Phospho-Thr
  See specification as filed for detailed description of substitutions and preferred embodiments
DANPLMACGTLTRRHQNGRF

SEQ ID NO: 1522 - protein, 20 aa, Artificial Sequence
  Description of Artificial Sequence: Synthetic peptide
  N-term H or Acetyl
  MOD_RES (8)..(8): Modified Cys
  MOD_RES (10)..(10): Thr or Phospho-Thr
  See specification as filed for detailed description of substitutions and preferred embodiments
DANPAMACGTLTRRHQNGRF

SEQ ID NO: 1523 - protein, 20 aa, Artificial Sequence
  Description of Artificial Sequence: Synthetic peptide
  N-term H or Acetyl
  MOD_RES (8)..(8): Modified Cys
  MOD_RES (10)..(10): Thr or Phospho-Thr
  See specification as filed for detailed description of substitutions and preferred embodiments
DANPDMACGTLTRRHQNGRF

SEQ ID NO: 1524 - protein, 20 aa, Artificial Sequence
  Description of Artificial Sequence: Synthetic peptide
  N-term H or Acetyl
  MOD_RES (8)..(8): Modified Cys
  MOD_RES (10)..(10): Thr or Phospho-Thr
  See specification as filed for detailed description of substitutions and preferred embodiments
DANPEMACGTLTRRHQNGRF

SEQ ID NO: 1525 - protein, 20 aa, Artificial Sequence
  Description of Artificial Sequence: Synthetic peptide
  N-term H or Acetyl
  MOD_RES (8)..(8): Modified Cys
  MOD_RES (10)..(10): Thr or Phospho-Thr
  See specification as filed for detailed description of substitutions and preferred embodiments
DANPFMACGTLTRRHQNGRF

SEQ ID NO: 1526 - protein, 20 aa, Artificial Sequence
  Description of Artificial Sequence: Synthetic peptide
  N-term H or Acetyl
  MOD_RES (8)..(8): Modified Cys
  MOD_RES (10)..(10): Thr or Phospho-Thr
  See specification as filed for detailed description of substitutions and preferred embodiments
DANPGMACGTLTRRHQNGRF

SEQ ID NO: 1527 - protein, 20 aa, Artificial Sequence
  Description of Artificial Sequence: Synthetic peptide
  N-term H or Acetyl
  MOD_RES (8)..(8): Modified Cys
  MOD_RES (10)..(10): Thr or Phospho-Thr
  See specification as filed for detailed description of substitutions and preferred embodiments
DANPHMACGTLTRRHQNGRF

SEQ ID NO: 1528 - protein, 20 aa, Artificial Sequence
  Description of Artificial Sequence: Synthetic peptide
  N-term H or Acetyl
  MOD_RES (8)..(8): Modified Cys
  MOD_RES (10)..(10): Thr or Phospho-Thr
  See specification as filed for detailed description of substitutions and preferred embodiments
DANPIMACGTLTRRHQNGRF

SEQ ID NO: 1529 - protein, 20 aa, Artificial Sequence
  Description of Artificial Sequence: Synthetic peptide
  N-term H or Acetyl
  MOD_RES (8)..(8): Modified Cys
  MOD_RES (10)..(10): Thr or Phospho-Thr
  See specification as filed for detailed description of substitutions and preferred embodiments
DANPKMACGTLTRRHQNGRF

SEQ ID NO: 1530 - protein, 20 aa, Artificial Sequence
  Description of Artificial Sequence: Synthetic peptide
  N-term H or Acetyl
  MOD_RES (6)..(6): Leu or Nle (i.e. isomer of Leucine)
  MOD_RES (8)..(8): Modified Cys
  MOD_RES (10)..(10): Thr or Phospho-Thr
  See specification as filed for detailed description of substitutions and preferred embodiments
DANPLLACGTLTRRHQNGRF

SEQ ID NO: 1531 - protein, 20 aa, Artificial Sequence
  Description of Artificial Sequence: Synthetic peptide
  N-term H or Acetyl
  MOD_RES (8)..(8): Modified Cys
  MOD_RES (10)..(10): Thr or Phospho-Thr
  See specification as filed for detailed description of substitutions and preferred embodiments
DANPLAACGTLTRRHQNGRF

SEQ ID NO: 1532 - protein, 20 aa, Artificial Sequence
  Description of Artificial Sequence: Synthetic peptide
  N-term H or Acetyl
  MOD_RES (8)..(8): Modified Cys
  MOD_RES (10)..(10): Thr or Phospho-Thr
  See specification as filed for detailed description of substitutions and preferred embodiments
DANPLDACGTLTRRHQNGRF

SEQ ID NO: 1533 - protein, 20 aa, Artificial Sequence
  Description of Artificial Sequence: Synthetic peptide
  N-term H or Acetyl
  MOD_RES (8)..(8): Modified Cys
  MOD_RES (10)..(10): Thr or Phospho-Thr
  See specification as filed for detailed description of substitutions and preferred embodiments
DANPLEACGTLTRRHQNGRF

SEQ ID NO: 1534 - protein, 20 aa, Artificial Sequence
  Description of Artificial Sequence: Synthetic peptide
  N-term H or Acetyl
  MOD_RES (8)..(8): Modified Cys
  MOD_RES (10)..(10): Thr or Phospho-Thr
  See specification as filed for detailed description of substitutions and preferred embodiments
DANPLFACGTLTRRHQNGRF

SEQ ID NO: 1535 - protein, 20 aa, Artificial Sequence
  Description of Artificial Sequence: Synthetic peptide
  N-term H or Acetyl
  MOD_RES (8)..(8): Modified Cys
  MOD_RES (10)..(10): Thr or Phospho-Thr
  See specification as filed for detailed description of substitutions and preferred embodiments
DANPLGACGTLTRRHQNGRF

SEQ ID NO: 1536 - protein, 20 aa, Artificial Sequence
  Description of Artificial Sequence: Synthetic peptide
  N-term H or Acetyl
  MOD_RES (8)..(8): Modified Cys
  MOD_RES (10)..(10): Thr or Phospho-Thr
  See specification as filed for detailed description of substitutions and preferred embodiments
DANPLHACGTLTRRHQNGRF

SEQ ID NO: 1537 - protein, 20 aa, Artificial Sequence
  Description of Artificial Sequence: Synthetic peptide
  N-term H or Acetyl
  MOD_RES (8)..(8): Modified Cys
  MOD_RES (10)..(10): Thr or Phospho-Thr
  See specification as filed for detailed description of substitutions and preferred embodiments
DANPLIACGTLTRRHQNGRF

SEQ ID NO: 1538 - protein, 20 aa, Artificial Sequence
  Description of Artificial Sequence: Synthetic peptide
  N-term H or Acetyl
  MOD_RES (8)..(8): Modified Cys
  MOD_RES (10)..(10): Thr or Phospho-Thr
  See specification as filed for detailed description of substitutions and preferred embodiments
DANPLKACGTLTRRHQNGRF

SEQ ID NO: 1539 - protein, 20 aa, Artificial Sequence
  Description of Artificial Sequence: Synthetic peptide
  N-term H or Acetyl
  MOD_RES (8)..(8): Modified Cys
  MOD_RES (10)..(10): Thr or Phospho-Thr
  See specification as filed for detailed description of substitutions and preferred embodiments
DANPLLACGTLTRRHQNGRF

SEQ ID NO: 1540 - protein, 20 aa, Artificial Sequence
  Description of Artificial Sequence: Synthetic peptide
  N-term H or Acetyl
  MOD_RES (7)..(7): Leu or Nle (i.e. isomer of Leucine)
  MOD_RES (8)..(8): Modified Cys
  MOD_RES (10)..(10): Thr or Phospho-Thr
  See specification as filed for detailed description of substitutions and preferred embodiments
DANPLMLCGTLTRRHQNGRF

SEQ ID NO: 1541 - protein, 20 aa, Artificial Sequence
  Description of Artificial Sequence: Synthetic peptide
  N-term H or Acetyl
  MOD_RES (8)..(8): Modified Cys
  MOD_RES (9)..(9): Leu or Nle (i.e. isomer of Leucine)
  MOD_RES (10)..(10): Thr or Phospho-Thr
  See specification as filed for detailed description of substitutions and preferred embodiments
DANPLMACLTLTRRHQNGRF

SEQ ID NO: 1542 - protein, 20 aa, Artificial Sequence
  Description of Artificial Sequence: Synthetic peptide
  N-term H or Acetyl
  MOD_RES (8)..(8): Modified Cys
  MOD_RES (10)..(10): Thr or Phospho-Thr
  See specification as filed for detailed description of substitutions and preferred embodiments
DANPLMACATLTRRHQNGRF

SEQ ID NO: 1543 - protein, 20 aa, Artificial Sequence
  Description of Artificial Sequence: Synthetic peptide
  N-term H or Acetyl
  MOD_RES (8)..(8): Modified Cys
  MOD_RES (10)..(10): Thr or Phospho-Thr
  See specification as filed for detailed description of substitutions and preferred embodiments
DANPLMACDTLTRRHQNGRF

SEQ ID NO: 1544 - protein, 20 aa, Artificial Sequence
  Description of Artificial Sequence: Synthetic peptide
  N-term H or Acetyl
  MOD_RES (8)..(8): Modified Cys
  MOD_RES (10)..(10): Thr or Phospho-Thr
  See specification as filed for detailed description of substitutions and preferred embodiments
DANPLMACETLTRRHQNGRF

SEQ ID NO: 1545 - protein, 20 aa, Artificial Sequence
  Description of Artificial Sequence: Synthetic peptide
  N-term H or Acetyl
  MOD_RES (8)..(8): Modified Cys
  MOD_RES (10)..(10): Thr or Phospho-Thr
  See specification as filed for detailed description of substitutions and preferred embodiments
DANPLMACFTLTRRHQNGRF

SEQ ID NO: 1546 - protein, 20 aa, Artificial Sequence
  Description of Artificial Sequence: Synthetic peptide
  N-term H or Acetyl
  MOD_RES (8)..(8): Modified Cys
  MOD_RES (10)..(10): Thr or Phospho-Thr
  See specification as filed for detailed description of substitutions and preferred embodiments
DANPLMACGTATRRHQNGRF

SEQ ID NO: 1547 - protein, 20 aa, Artificial Sequence
  Description of Artificial Sequence: Synthetic peptide
  N-term H or Acetyl
  MOD_RES (8)..(8): Modified Cys
  MOD_RES (10)..(10): Thr or Phospho-Thr
  See specification as filed for detailed description of substitutions and preferred embodiments
DANPLMACGTDTRRHQNGRF

SEQ ID NO: 1548 - protein, 20 aa, Artificial Sequence
  Description of Artificial Sequence: Synthetic peptide
  N-term H or Acetyl
  MOD_RES (8)..(8): Modified Cys
  MOD_RES (10)..(10): Thr or Phospho-Thr
  See specification as filed for detailed description of substitutions and preferred embodiments
DANPLMACGTETRRHQNGRF

SEQ ID NO: 1549 - protein, 20 aa, Artificial Sequence
  Description of Artificial Sequence: Synthetic peptide
  N-term H or Acetyl
  MOD_RES (8)..(8): Modified Cys
  MOD_RES (10)..(10): Thr or Phospho-Thr
  See specification as filed for detailed description of substitutions and preferred embodiments
DANPLMACGTFTRRHQNGRF

SEQ ID NO: 1550 - protein, 20 aa, Artificial Sequence
  Description of Artificial Sequence: Synthetic peptide
  N-term H or Acetyl
  MOD_RES (8)..(8): Modified Cys
  MOD_RES (10)..(10): Thr or Phospho-Thr
  MOD_RES (12)..(12): Thr or Phospho-Thr
  See specification as filed for detailed description of substitutions and preferred embodiments
DANPLMACGTGTRRHQNGRF

SEQ ID NO: 1551 - protein, 20 aa, Artificial Sequence
  Description of Artificial Sequence: Synthetic peptide
  N-term H or Acetyl
  MOD_RES (8)..(8): Modified Cys
  MOD_RES (10)..(10): Thr or Phospho-Thr
  See specification as filed for detailed description of substitutions and preferred embodiments
DANPLMACGTHTRRHQNGRF

SEQ ID NO: 1552 - protein, 20 aa, Artificial Sequence
  Description of Artificial Sequence: Synthetic peptide
  N-term H or Acetyl
  MOD_RES (8)..(8): Modified Cys
  MOD_RES (10)..(10): Thr or Phospho-Thr
  See specification as filed for detailed description of substitutions and preferred embodiments
DANPLMACGTITRRHQNGRF

SEQ ID NO: 1553 - protein, 20 aa, Artificial Sequence
  Description of Artificial Sequence: Synthetic peptide
  N-term H or Acetyl
  MOD_RES (8)..(8): Modified Cys
  MOD_RES (10)..(10): Thr or Phospho-Thr
  See specification as filed for detailed description of substitutions and preferred embodiments
DANPLMACGTKTRRHQNGRF

SEQ ID NO: 1554 - protein, 20 aa, Artificial Sequence
  Description of Artificial Sequence: Synthetic peptide
  N-term H or Acetyl
  MOD_RES (8)..(8): Modified Cys
  MOD_RES (10)..(10): Thr or Phospho-Thr
  MOD_RES (12)..(12): Leu or Nle (i.e. isomer of Leucine)
  See specification as filed for detailed description of substitutions and preferred embodiments
DANPLMACGTLLRRHQNGRF

SEQ ID NO: 1555 - protein, 20 aa, Artificial Sequence
  Description of Artificial Sequence: Synthetic peptide
  N-term H or Acetyl
  MOD_RES (8)..(8): Modified Cys
  MOD_RES (10)..(10): Thr or Phospho-Thr
  See specification as filed for detailed description of substitutions and preferred embodiments
DANPLMACGTLARRHQNGRF

SEQ ID NO: 1556 - protein, 20 aa, Artificial Sequence
  Description of Artificial Sequence: Synthetic peptide
  N-term H or Acetyl
  MOD_RES (8)..(8): Modified Cys
  MOD_RES (10)..(10): Thr or Phospho-Thr
  See specification as filed for detailed description of substitutions and preferred embodiments
DANPLMACGTLDRRHQNGRF

SEQ ID NO: 1557 - protein, 20 aa, Artificial Sequence
  Description of Artificial Sequence: Synthetic peptide
  N-term H or Acetyl
  MOD_RES (8)..(8): Modified Cys
  MOD_RES (10)..(10): Thr or Phospho-Thr
  See specification as filed for detailed description of substitutions and preferred embodiments
DANPLMACGTLERRHQNGRF

SEQ ID NO: 1558 - protein, 20 aa, Artificial Sequence
  Description of Artificial Sequence: Synthetic peptide
  N-term H or Acetyl
  MOD_RES (8)..(8): Modified Cys
  MOD_RES (10)..(10): Thr or Phospho-Thr
  See specification as filed for detailed description of substitutions and preferred embodiments
DANPLMACGTLFRRHQNGRF

SEQ ID NO: 1559 - protein, 20 aa, Artificial Sequence
  Description of Artificial Sequence: Synthetic peptide
  N-term H or Acetyl
  MOD_RES (8)..(8): Modified Cys
  MOD_RES (10)..(10): Thr or Phospho-Thr
  See specification as filed for detailed description of substitutions and preferred embodiments
DANPLMACGTLGRRHQNGRF

SEQ ID NO: 1560 - protein, 20 aa, Artificial Sequence
  Description of Artificial Sequence: Synthetic peptide
  N-term H or Acetyl
  MOD_RES (8)..(8): Modified Cys
  MOD_RES (10)..(10): Thr or Phospho-Thr
  See specification as filed for detailed description of substitutions and preferred embodiments
DANPLMACGTLHRRHQNGRF

SEQ ID NO: 1561 - protein, 20 aa, Artificial Sequence
  Description of Artificial Sequence: Synthetic peptide
  N-term H or Acetyl
  MOD_RES (8)..(8): Modified Cys
  MOD_RES (10)..(10): Thr or Phospho-Thr
  See specification as filed for detailed description of substitutions and preferred embodiments
DANPLMACGTLIRRHQNGRF

SEQ ID NO: 1562 - protein, 20 aa, Artificial Sequence
  Description of Artificial Sequence: Synthetic peptide
  N-term H or Acetyl
  MOD_RES (8)..(8): Modified Cys
  MOD_RES (10)..(10): Thr or Phospho-Thr
  See specification as filed for detailed description of substitutions and preferred embodiments
DANPLMACGTLKRRHQNGRF

SEQ ID NO: 1563 - protein, 20 aa, Artificial Sequence
  Description of Artificial Sequence: Synthetic peptide
  N-term H or Acetyl
  MOD_RES (8)..(8): Modified Cys
  MOD_RES (10)..(10): Thr or Phospho-Thr
  See specification as filed for detailed description of substitutions and preferred embodiments
DANPLMACGTLLRRHQNGRF

SEQ ID NO: 1564 - protein, 20 aa, Artificial Sequence
  Description of Artificial Sequence: Synthetic peptide
  N-term H or Acetyl
  MOD_RES (8)..(8): Modified Cys
  MOD_RES (10)..(10): Thr or Phospho-Thr
  See specification as filed for detailed description of substitutions and preferred embodiments
DANPLMACGTLNRRHQNGRF

SEQ ID NO: 1565 - protein, 20 aa, Artificial Sequence
  Description of Artificial Sequence: Synthetic peptide
  N-term H or Acetyl
  MOD_RES (8)..(8): Modified Cys
  MOD_RES (10)..(10): Thr or Phospho-Thr
  See specification as filed for detailed description of substitutions and preferred embodiments
DANPLMACGTLPRRHQNGRF

SEQ ID NO: 1566 - protein, 20 aa, Artificial Sequence
  Description of Artificial Sequence: Synthetic peptide
  N-term H or Acetyl
  MOD_RES (8)..(8): Modified Cys
  MOD_RES (10)..(10): Thr or Phospho-Thr
  See specification as filed for detailed description of substitutions and preferred embodiments
DANPLMACGTLQRRHQNGRF

SEQ ID NO: 1567 - protein, 20 aa, Artificial Sequence
  Description of Artificial Sequence: Synthetic peptide
  N-term H or Acetyl
  MOD_RES (8)..(8): Modified Cys
  MOD_RES (10)..(10): Thr or Phospho-Thr
  See specification as filed for detailed description of substitutions and preferred embodiments
DANPLMACGTLRRRHQNGRF

SEQ ID NO: 1568 - protein, 20 aa, Artificial Sequence
  Description of Artificial Sequence: Synthetic peptide
  N-term H or Acetyl
  MOD_RES (8)..(8): Modified Cys
  MOD_RES (10)..(10): Thr or Phospho-Thr
  MOD_RES (13)..(13): Leu or Nle (i.e. isomer of Leucine)
  See specification as filed for detailed description of substitutions and preferred embodiments
DANPLMACGTLTLRHQNGRF

SEQ ID NO: 1569 - protein, 20 aa, Artificial Sequence
  Description of Artificial Sequence: Synthetic peptide
  N-term H or Acetyl
  MOD_RES (8)..(8): Modified Cys
  MOD_RES (10)..(10): Thr or Phospho-Thr
  See specification as filed for detailed description of substitutions and preferred embodiments
DANPLMACGTLTARHQNGRF

SEQ ID NO: 1570 - protein, 20 aa, Artificial Sequence
  Description of Artificial Sequence: Synthetic peptide
  N-term H or Acetyl
  MOD_RES (8)..(8): Modified Cys
  MOD_RES (10)..(10): Thr or Phospho-Thr
  See specification as filed for detailed description of substitutions and preferred embodiments
DANPLMACGTLTDRHQNGRF

SEQ ID NO: 1571 - protein, 20 aa, Artificial Sequence
  Description of Artificial Sequence: Synthetic peptide
  N-term H or Acetyl
  MOD_RES (8)..(8): Modified Cys
  MOD_RES (10)..(10): Thr or Phospho-Thr
  See specification as filed for detailed description of substitutions and preferred embodiments
DANPLMACGTLTERHQNGRF

SEQ ID NO: 1572 - protein, 20 aa, Artificial Sequence
  Description of Artificial Sequence: Synthetic peptide
  N-term H or Acetyl
  MOD_RES (8)..(8): Modified Cys
  MOD_RES (10)..(10): Thr or Phospho-Thr
  See specification as filed for detailed description of substitutions and preferred embodiments
DANPLMACGTLTFRHQNGRF

SEQ ID NO: 1573 - protein, 20 aa, Artificial Sequence
  Description of Artificial Sequence: Synthetic peptide
  N-term H or Acetyl
  MOD_RES (8)..(8): Modified Cys
  MOD_RES (10)..(10): Thr or Phospho-Thr
  See specification as filed for detailed description of substitutions and preferred embodiments
DANPLMACGTLTGRHQNGRF

SEQ ID NO: 1574 - protein, 20 aa, Artificial Sequence
  Description of Artificial Sequence: Synthetic peptide
  N-term H or Acetyl
  MOD_RES (8)..(8): Modified Cys
  MOD_RES (10)..(10): Thr or Phospho-Thr
  See specification as filed for detailed description of substitutions and preferred embodiments
DANPLMACGTLTHRHQNGRF

SEQ ID NO: 1575 - protein, 20 aa, Artificial Sequence
  Description of Artificial Sequence: Synthetic peptide
  N-term H or Acetyl
  MOD_RES (8)..(8): Modified Cys
  MOD_RES (10)..(10): Thr or Phospho-Thr
  See specification as filed for detailed description of substitutions and preferred embodiments
DANPLMACGTLTIRHQNGRF

SEQ ID NO: 1576 - protein, 20 aa, Artificial Sequence
  Description of Artificial Sequence: Synthetic peptide
  N-term H or Acetyl
  MOD_RES (8)..(8): Modified Cys
  MOD_RES (10)..(10): Thr or Phospho-Thr
  See specification as filed for detailed description of substitutions and preferred embodiments
DANPLMACGTLTKRHQNGRF

SEQ ID NO: 1577 - protein, 20 aa, Artificial Sequence
  Description of Artificial Sequence: Synthetic peptide
  N-term H or Acetyl
  MOD_RES (8)..(8): Modified Cys
  MOD_RES (10)..(10): Thr or Phospho-Thr
  See specification as filed for detailed description of substitutions and preferred embodiments
DANPLMACGTLTLRHQNGRF

SEQ ID NO: 1578 - protein, 20 aa, Artificial Sequence
  Description of Artificial Sequence: Synthetic peptide
  N-term H or Acetyl
  MOD_RES (8)..(8): Modified Cys
  MOD_RES (10)..(10): Thr or Phospho-Thr
  See specification as filed for detailed description of substitutions and preferred embodiments
DANPLMACGTLTNRHQNGRF

SEQ ID NO: 1579 - protein, 20 aa, Artificial Sequence
  Description of Artificial Sequence: Synthetic peptide
  N-term H or Acetyl
  MOD_RES (8)..(8): Modified Cys
  MOD_RES (10)..(10): Thr or Phospho-Thr
  See specification as filed for detailed description of substitutions and preferred embodiments
DANPLMACGTLTPRHQNGRF

SEQ ID NO: 1580 - protein, 20 aa, Artificial Sequence
  Description of Artificial Sequence: Synthetic peptide
  N-term H or Acetyl
  MOD_RES (8)..(8): Modified Cys
  MOD_RES (10)..(10): Thr or Phospho-Thr
  See specification as filed for detailed description of substitutions and preferred embodiments
DANPLMACGTLTQRHQNGRF

SEQ ID NO: 1581 - protein, 20 aa, Artificial Sequence
  Description of Artificial Sequence: Synthetic peptide
  N-term H or Acetyl
  MOD_RES (8)..(8): Modified Cys
  MOD_RES (10)..(10): Thr or Phospho-Thr
  MOD_RES (14)..(14): Leu or Nle (i.e. isomer of Leucine)
  See specification as filed for detailed description of substitutions and preferred embodiments
DANPLMACGTLTRLHQNGRF

SEQ ID NO: 1582 - protein, 20 aa, Artificial Sequence
  Description of Artificial Sequence: Synthetic peptide
  N-term H or Acetyl
  MOD_RES (8)..(8): Modified Cys
  MOD_RES (10)..(10): Thr or Phospho-Thr
  See specification as filed for detailed description of substitutions and preferred embodiments
DANPLMACGTLTRAHQNGRF

SEQ ID NO: 1583 - protein, 20 aa, Artificial Sequence
  Description of Artificial Sequence: Synthetic peptide
  N-term H or Acetyl
  MOD_RES (8)..(8): Modified Cys
  MOD_RES (10)..(10): Thr or Phospho-Thr
  See specification as filed for detailed description of substitutions and preferred embodiments
DANPLMACGTLTRDHQNGRF

SEQ ID NO: 1584 - protein, 20 aa, Artificial Sequence
  Description of Artificial Sequence: Synthetic peptide
  N-term H or Acetyl
  MOD_RES (8)..(8): Modified Cys
  MOD_RES (10)..(10): Thr or Phospho-Thr
  See specification as filed for detailed description of substitutions and preferred embodiments
DANPLMACGTLTREHQNGRF

SEQ ID NO: 1585 - protein, 20 aa, Artificial Sequence
  Description of Artificial Sequence: Synthetic peptide
  N-term H or Acetyl
  MOD_RES (8)..(8): Modified Cys
  MOD_RES (10)..(10): Thr or Phospho-Thr
  See specification as filed for detailed description of substitutions and preferred embodiments
DANPLMACGTLTRFHQNGRF

SEQ ID NO: 1586 - protein, 20 aa, Artificial Sequence
  Description of Artificial Sequence: Synthetic peptide
  N-term H or Acetyl
  MOD_RES (8)..(8): Modified Cys
  MOD_RES (10)..(10): Thr or Phospho-Thr
  See specification as filed for detailed description of substitutions and preferred embodiments
DANPLMACGTLTRGHQNGRF

SEQ ID NO: 1587 - protein, 20 aa, Artificial Sequence
  Description of Artificial Sequence: Synthetic peptide
  N-term H or Acetyl
  MOD_RES (8)..(8): Modified Cys
  MOD_RES (10)..(10): Thr or Phospho-Thr
  See specification as filed for detailed description of substitutions and preferred embodiments
DANPLMACGTLTRHHQNGRF

SEQ ID NO: 1588 - protein, 20 aa, Artificial Sequence
  Description of Artificial Sequence: Synthetic peptide
  N-term H or Acetyl
  MOD_RES (8)..(8): Modified Cys
  MOD_RES (10)..(10): Thr or Phospho-Thr
  See specification as filed for detailed description of substitutions and preferred embodiments
DANPLMACGTLTRIHQNGRF

SEQ ID NO: 1589 - protein, 20 aa, Artificial Sequence
  Description of Artificial Sequence: Synthetic peptide
  N-term H or Acetyl
  MOD_RES (8)..(8): Modified Cys
  MOD_RES (10)..(10): Thr or Phospho-Thr
  See specification as filed for detailed description of substitutions and preferred embodiments
DANPLMACGTLTRKHQNGRF

SEQ ID NO: 1590 - protein, 20 aa, Artificial Sequence
  Description of Artificial Sequence: Synthetic peptide
  N-term H or Acetyl
  MOD_RES (8)..(8): Modified Cys
  MOD_RES (10)..(10): Thr or Phospho-Thr
  See specification as filed for detailed description of substitutions and preferred embodiments
DANPLMACGTLTRLHQNGRF

SEQ ID NO: 1591 - protein, 20 aa, Artificial Sequence
  Description of Artificial Sequence: Synthetic peptide
  N-term H or Acetyl
  MOD_RES (8)..(8): Modified Cys
  MOD_RES (10)..(10): Thr or Phospho-Thr
  See specification as filed for detailed description of substitutions and preferred embodiments
DANPLMACGTLTRNHQNGRF

SEQ ID NO: 1592 - protein, 20 aa, Artificial Sequence
  Description of Artificial Sequence: Synthetic peptide
  N-term H or Acetyl
  MOD_RES (8)..(8): Modified Cys
  MOD_RES (10)..(10): Thr or Phospho-Thr
  See specification as filed for detailed description of substitutions and preferred embodiments
DANPLMACGTLTRPHQNGRF

SEQ ID NO: 1593 - protein, 20 aa, Artificial Sequence
  Description of Artificial Sequence: Synthetic peptide
  N-term H or Acetyl
  MOD_RES (8)..(8): Modified Cys
  MOD_RES (10)..(10): Thr or Phospho-Thr
  See specification as filed for detailed description of substitutions and preferred embodiments
DANPLMACGTLTRQHQNGRF

SEQ ID NO: 1594 - protein, 20 aa, Artificial Sequence
  Description of Artificial Sequence: Synthetic peptide
  N-term H or Acetyl
  MOD_RES (8)..(8): Modified Cys
  MOD_RES (10)..(10): Thr or Phospho-Thr
  MOD_RES (15)..(15): Leu or Nle (i.e. isomer of Leucine)
  See specification as filed for detailed description of substitutions and preferred embodiments
DANPLMACGTLTRRLQNGRF

SEQ ID NO: 1595 - protein, 20 aa, Artificial Sequence
  Description of Artificial Sequence: Synthetic peptide
  N-term H or Acetyl
  MOD_RES (8)..(8): Modified Cys
  MOD_RES (10)..(10): Thr or Phospho-Thr
  See specification as filed for detailed description of substitutions and preferred embodiments
DANPLMACGTLTRRAQNGRF

SEQ ID NO: 1596 - protein, 20 aa, Artificial Sequence
  Description of Artificial Sequence: Synthetic peptide
  N-term H or Acetyl
  MOD_RES (8)..(8): Modified Cys
  MOD_RES (10)..(10): Thr or Phospho-Thr
  See specification as filed for detailed description of substitutions and preferred embodiments
DANPLMACGTLTRRDQNGRF

SEQ ID NO: 1597 - protein, 20 aa, Artificial Sequence
  Description of Artificial Sequence: Synthetic peptide
  N-term H or Acetyl
  MOD_RES (8)..(8): Modified Cys
  MOD_RES (10)..(10): Thr or Phospho-Thr
  See specification as filed for detailed description of substitutions and preferred embodiments
DANPLMACGTLTRREQNGRF

SEQ ID NO: 1598 - protein, 20 aa, Artificial Sequence
  Description of Artificial Sequence: Synthetic peptide
  N-term H or Acetyl
  MOD_RES (8)..(8): Modified Cys
  MOD_RES (10)..(10): Thr or Phospho-Thr
  See specification as filed for detailed description of substitutions and preferred embodiments
DANPLMACGTLTRRFQNGRF

SEQ ID NO: 1599 - protein, 20 aa, Artificial Sequence
  Description of Artificial Sequence: Synthetic peptide
  N-term H or Acetyl
  MOD_RES (8)..(8): Modified Cys
  MOD_RES (10)..(10): Thr or Phospho-Thr
  See specification as filed for detailed description of substitutions and preferred embodiments
DANPLMACGTLTRRGQNGRF

SEQ ID NO: 1600 - protein, 20 aa, Artificial Sequence
  Description of Artificial Sequence: Synthetic peptide
  N-term H or Acetyl
  MOD_RES (8)..(8): Modified Cys
  MOD_RES (10)..(10): Thr or Phospho-Thr
  MOD_RES (16)..(16): Leu or Nle (i.e. isomer of Leucine)
  See specification as filed for detailed description of substitutions and preferred embodiments
DANPLMACGTLTRRHLNGRF

SEQ ID NO: 1601 - protein, 20 aa, Artificial Sequence
  Description of Artificial Sequence: Synthetic peptide
  N-term H or Acetyl
  MOD_RES (8)..(8): Modified Cys
  MOD_RES (10)..(10): Thr or Phospho-Thr
  See specification as filed for detailed description of substitutions and preferred embodiments
DANPLMACGTLTRRHANGRF

SEQ ID NO: 1602 - protein, 20 aa, Artificial Sequence
  Description of Artificial Sequence: Synthetic peptide
  N-term H or Acetyl
  MOD_RES (8)..(8): Modified Cys
  MOD_RES (10)..(10): Thr or Phospho-Thr
  See specification as filed for detailed description of substitutions and preferred embodiments
DANPLMACGTLTRRHDNGRF

SEQ ID NO: 1603 - protein, 20 aa, Artificial Sequence
  Description of Artificial Sequence: Synthetic peptide
  N-term H or Acetyl
  MOD_RES (8)..(8): Modified Cys
  MOD_RES (10)..(10): Thr or Phospho-Thr
  See specification as filed for detailed description of substitutions and preferred embodiments
DANPLMACGTLTRRHENGRF

SEQ ID NO: 1604 - protein, 20 aa, Artificial Sequence
  Description of Artificial Sequence: Synthetic peptide
  N-term H or Acetyl
  MOD_RES (8)..(8): Modified Cys
  MOD_RES (10)..(10): Thr or Phospho-Thr
  See specification as filed for detailed description of substitutions and preferred embodiments
DANPLMACGTLTRRHFNGRF

SEQ ID NO: 1605 - protein, 20 aa, Artificial Sequence
  Description of Artificial Sequence: Synthetic peptide
  N-term H or Acetyl
  MOD_RES (8)..(8): Modified Cys
  MOD_RES (10)..(10): Thr or Phospho-Thr
  See specification as filed for detailed description of substitutions and preferred embodiments
DANPLMACGTLTRRHGNGRF

SEQ ID NO: 1606 - protein, 20 aa, Artificial Sequence
  Description of Artificial Sequence: Synthetic peptide
  N-term H or Acetyl
  MOD_RES (8)..(8): Modified Cys
  MOD_RES (10)..(10): Thr or Phospho-Thr
  See specification as filed for detailed description of substitutions and preferred embodiments
DANPLMACGTLTRRHHNGRF

SEQ ID NO: 1607 - protein, 20 aa, Artificial Sequence
  Description of Artificial Sequence: Synthetic peptide
  N-term H or Acetyl
  MOD_RES (8)..(8): Modified Cys
  MOD_RES (10)..(10): Thr or Phospho-Thr
  See specification as filed for detailed description of substitutions and preferred embodiments
DANPLMACGTLTRRHINGRF

SEQ ID NO: 1608 - protein, 20 aa, Artificial Sequence
  Description of Artificial Sequence: Synthetic peptide
  N-term H or Acetyl
  MOD_RES (8)..(8): Modified Cys
  MOD_RES (10)..(10): Thr or Phospho-Thr
  See specification as filed for detailed description of substitutions and preferred embodiments
DANPLMACGTLTRRHKNGRF

SEQ ID NO: 1609 - protein, 20 aa, Artificial Sequence
  Description of Artificial Sequence: Synthetic peptide
  N-term H or Acetyl
  MOD_RES (8)..(8): Modified Cys
  MOD_RES (10)..(10): Thr or Phospho-Thr
  See specification as filed for detailed description of substitutions and preferred embodiments
DANPLMACGTLTRRHLNGRF

SEQ ID NO: 1610 - protein, 20 aa, Artificial Sequence
  Description of Artificial Sequence: Synthetic peptide
  N-term H or Acetyl
  MOD_RES (8)..(8): Modified Cys
  MOD_RES (10)..(10): Thr or Phospho-Thr
  See specification as filed for detailed description of substitutions and preferred embodiments
DANPLMACGTLTRRHNNGRF

SEQ ID NO: 1611 - protein, 20 aa, Artificial Sequence
  Description of Artificial Sequence: Synthetic peptide
  N-term H or Acetyl
  MOD_RES (8)..(8): Modified Cys
  MOD_RES (10)..(10): Thr or Phospho-Thr
  See specification as filed for detailed description of substitutions and preferred embodiments
DANPLMACGTLTRRHPNGRF

SEQ ID NO: 1612 - protein, 20 aa, Artificial Sequence
  Description of Artificial Sequence: Synthetic peptide
  N-term H or Acetyl
  MOD_RES (8)..(8): Modified Cys
  MOD_RES (10)..(10): Thr or Phospho-Thr
  MOD_RES (17)..(17): Leu or Nle (i.e. isomer of Leucine)
  See specification as filed for detailed description of substitutions and preferred embodiments
DANPLMACGTLTRRHQLGRF

SEQ ID NO: 1613 - protein, 20 aa, Artificial Sequence
  Description of Artificial Sequence: Synthetic peptide
  N-term H or Acetyl
  MOD_RES (8)..(8): Modified Cys
  MOD_RES (10)..(10): Thr or Phospho-Thr
  See specification as filed for detailed description of substitutions and preferred embodiments
DANPLMACGTLTRRHQAGRF

SEQ ID NO: 1614 - protein, 20 aa, Artificial Sequence
  Description of Artificial Sequence: Synthetic peptide
  N-term H or Acetyl
  MOD_RES (8)..(8): Modified Cys
  MOD_RES (10)..(10): Thr or Phospho-Thr
  See specification as filed for detailed description of substitutions and preferred embodiments
DANPLMACGTLTRRHQDGRF

SEQ ID NO: 1615 - protein, 20 aa, Artificial Sequence
  Description of Artificial Sequence: Synthetic peptide
  N-term H or Acetyl
  MOD_RES (8)..(8): Modified Cys
  MOD_RES (10)..(10): Thr or Phospho-Thr
  See specification as filed for detailed description of substitutions and preferred embodiments
DANPLMACGTLTRRHQEGRF

SEQ ID NO: 1616 - protein, 20 aa, Artificial Sequence
  Description of Artificial Sequence: Synthetic peptide
  N-term H or Acetyl
  MOD_RES (8)..(8): Modified Cys
  MOD_RES (10)..(10): Thr or Phospho-Thr
  See specification as filed for detailed description of substitutions and preferred embodiments
DANPLMACGTLTRRHQFGRF

SEQ ID NO: 1617 - protein, 20 aa, Artificial Sequence
  Description of Artificial Sequence: Synthetic peptide
  N-term H or Acetyl
  MOD_RES (8)..(8): Modified Cys
  MOD_RES (10)..(10): Thr or Phospho-Thr
  See specification as filed for detailed description of substitutions and preferred embodiments
DANPLMACGTLTRRHQGGRF

SEQ ID NO: 1618 - protein, 20 aa, Artificial Sequence
  Description of Artificial Sequence: Synthetic peptide
  N-term H or Acetyl
  MOD_RES (8)..(8): Modified Cys
  MOD_RES (10)..(10): Thr or Phospho-Thr
  See specification as filed for detailed description of substitutions and preferred embodiments
DANPLMACGTLTRRHQHGRF

SEQ ID NO: 1619 - protein, 20 aa, Artificial Sequence
  Description of Artificial Sequence: Synthetic peptide
  N-term H or Acetyl
  MOD_RES (8)..(8): Modified Cys
  MOD_RES (10)..(10): Thr or Phospho-Thr
  See specification as filed for detailed description of substitutions and preferred embodiments
DANPLMACGTLTRRHQIGRF

SEQ ID NO: 1620 - protein, 20 aa, Artificial Sequence
  Description of Artificial Sequence: Synthetic peptide
  N-term H or Acetyl
  MOD_RES (8)..(8): Modified Cys
  MOD_RES (10)..(10): Thr or Phospho-Thr
  See specification as filed for detailed description of substitutions and preferred embodiments
DANPLMACGTLTRRHQKGRF

SEQ ID NO: 1621 - protein, 20 aa, Artificial Sequence
  Description of Artificial Sequence: Synthetic peptide
  N-term H or Acetyl
  MOD_RES (8)..(8): Modified Cys
  MOD_RES (10)..(10): Thr or Phospho-Thr
  See specification as filed for detailed description of substitutions and preferred embodiments
DANPLMACGTLTRRHQLGRF

SEQ ID NO: 1622 - protein, 20 aa, Artificial Sequence
  Description of Artificial Sequence: Synthetic peptide
  N-term H or Acetyl
  MOD_RES (8)..(8): Modified Cys
  MOD_RES (10)..(10): Thr or Phospho-Thr
  MOD_RES (18)..(18): Leu or Nle (i.e. isomer of Leucine)
  See specification as filed for detailed description of substitutions and preferred embodiments
DANPLMACGTLTRRHQNLRF

SEQ ID NO: 1623 - protein, 20 aa, Artificial Sequence
  Description of Artificial Sequence: Synthetic peptide
  N-term H or Acetyl
  MOD_RES (8)..(8): Modified Cys
  MOD_RES (10)..(10): Thr or Phospho-Thr
  See specification as filed for detailed description of substitutions and preferred embodiments
DANPLMACGTLTRRHQNARF

SEQ ID NO: 1624 - protein, 20 aa, Artificial Sequence
  Description of Artificial Sequence: Synthetic peptide
  N-term H or Acetyl
  MOD_RES (8)..(8): Modified Cys
  MOD_RES (10)..(10): Thr or Phospho-Thr
  See specification as filed for detailed description of substitutions and preferred embodiments
DANPLMACGTLTRRHQNDRF

SEQ ID NO: 1625 - protein, 20 aa, Artificial Sequence
  Description of Artificial Sequence: Synthetic peptide
  N-term H or Acetyl
  MOD_RES (8)..(8): Modified Cys
  MOD_RES (10)..(10): Thr or Phospho-Thr
  See specification as filed for detailed description of substitutions and preferred embodiments
DANPLMACGTLTRRHQNERF

SEQ ID NO: 1626 - protein, 20 aa, Artificial Sequence
  Description of Artificial Sequence: Synthetic peptide
  N-term H or Acetyl
  MOD_RES (8)..(8): Modified Cys
  MOD_RES (10)..(10): Thr or Phospho-Thr
  See specification as filed for detailed description of substitutions and preferred embodiments
DANPLMACGTLTRRHQNFRF

SEQ ID NO: 1627 - protein, 20 aa, Artificial Sequence
  Description of Artificial Sequence: Synthetic peptide
  N-term H or Acetyl
  MOD_RES (8)..(8): Modified Cys
  MOD_RES (10)..(10): Thr or Phospho-Thr
  MOD_RES (19)..(19): Leu or Nle (i.e. isomer of Leucine)
  See specification as filed for detailed description of substitutions and preferred embodiments
DANPLMACGTLTRRHQNGLF

SEQ ID NO: 1628 - protein, 20 aa, Artificial Sequence
  Description of Artificial Sequence: Synthetic peptide
  N-term H or Acetyl
  MOD_RES (8)..(8): Modified Cys
  MOD_RES (10)..(10): Thr or Phospho-Thr
  See specification as filed for detailed description of substitutions and preferred embodiments
DANPLMACGTLTRRHQNGAF

SEQ ID NO: 1629 - protein, 20 aa, Artificial Sequence
  Description of Artificial Sequence: Synthetic peptide
  N-term H or Acetyl
  MOD_RES (8)..(8): Modified Cys
  MOD_RES (10)..(10): Thr or Phospho-Thr
  See specification as filed for detailed description of substitutions and preferred embodiments
DANPLMACGTLTRRHQNGDF

SEQ ID NO: 1630 - protein, 20 aa, Artificial Sequence
  Description of Artificial Sequence: Synthetic peptide
  N-term H or Acetyl
  MOD_RES (8)..(8): Modified Cys
  MOD_RES (10)..(10): Thr or Phospho-Thr
  See specification as filed for detailed description of substitutions and preferred embodiments
DANPLMACGTLTRRHQNGEF

SEQ ID NO: 1631 - protein, 20 aa, Artificial Sequence
  Description of Artificial Sequence: Synthetic peptide
  N-term H or Acetyl
  MOD_RES (8)..(8): Modified Cys
  MOD_RES (10)..(10): Thr or Phospho-Thr
  See specification as filed for detailed description of substitutions and preferred embodiments
DANPLMACGTLTRRHQNGFF

SEQ ID NO: 1632 - protein, 20 aa, Artificial Sequence
  Description of Artificial Sequence: Synthetic peptide
  N-term H or Acetyl
  MOD_RES (8)..(8): Modified Cys
  MOD_RES (10)..(10): Thr or Phospho-Thr
  See specification as filed for detailed description of substitutions and preferred embodiments
DANPLMACGTLTRRHQNGGF

SEQ ID NO: 1633 - protein, 20 aa, Artificial Sequence
  Description of Artificial Sequence: Synthetic peptide
  N-term H or Acetyl
  MOD_RES (8)..(8): Modified Cys
  MOD_RES (10)..(10): Thr or Phospho-Thr
  See specification as filed for detailed description of substitutions and preferred embodiments
DANPLMACGTLTRRHQNGHF

SEQ ID NO: 1634 - protein, 20 aa, Artificial Sequence
  Description of Artificial Sequence: Synthetic peptide
  N-term H or Acetyl
  MOD_RES (8)..(8): Modified Cys
  MOD_RES (10)..(10): Thr or Phospho-Thr
  See specification as filed for detailed description of substitutions and preferred embodiments
DANPLMACGTLTRRHQNGIF

SEQ ID NO: 1635 - protein, 20 aa, Artificial Sequence
  Description of Artificial Sequence: Synthetic peptide
  N-term H or Acetyl
  MOD_RES (8)..(8): Modified Cys
  MOD_RES (10)..(10): Thr or Phospho-Thr
  See specification as filed for detailed description of substitutions and preferred embodiments
DANPLMACGTLTRRHQNGKF

SEQ ID NO: 1636 - protein, 20 aa, Artificial Sequence
  Description of Artificial Sequence: Synthetic peptide
  N-term H or Acetyl
  MOD_RES (8)..(8): Modified Cys
  MOD_RES (10)..(10): Thr or Phospho-Thr
  See specification as filed for detailed description of substitutions and preferred embodiments
DANPLMACGTLTRRHQNGLF

SEQ ID NO: 1637 - protein, 20 aa, Artificial Sequence
  Description of Artificial Sequence: Synthetic peptide
  N-term H or Acetyl
  MOD_RES (8)..(8): Modified Cys
  MOD_RES (10)..(10): Thr or Phospho-Thr
  See specification as filed for detailed description of substitutions and preferred embodiments
DANPLMACGTLTRRHQNGNF

SEQ ID NO: 1638 - protein, 20 aa, Artificial Sequence
  Description of Artificial Sequence: Synthetic peptide
  N-term H or Acetyl
  MOD_RES (8)..(8): Modified Cys
  MOD_RES (10)..(10): Thr or Phospho-Thr
  See specification as filed for detailed description of substitutions and preferred embodiments
DANPLMACGTLTRRHQNGPF

SEQ ID NO: 1639 - protein, 20 aa, Artificial Sequence
  Description of Artificial Sequence: Synthetic peptide
  N-term H or Acetyl
  MOD_RES (8)..(8): Modified Cys
  MOD_RES (10)..(10): Thr or Phospho-Thr
  See specification as filed for detailed description of substitutions and preferred embodiments
DANPLMACGTLTRRHQNGQF

SEQ ID NO: 1640 - protein, 20 aa, Artificial Sequence
  Description of Artificial Sequence: Synthetic peptide
  N-term H or Acetyl
  MOD_RES (8)..(8): Modified Cys
  MOD_RES (10)..(10): Thr or Phospho-Thr
  MOD_RES (20)..(20): Leu or Nle (i.e. isomer of Leucine)
  See specification as filed for detailed description of substitutions and preferred embodiments
DANPLMACGTLTRRHQNGRL

SEQ ID NO: 1641 - protein, 20 aa, Artificial Sequence
  Description of Artificial Sequence: Synthetic peptide
  N-term H or Acetyl
  MOD_RES (8)..(8): Modified Cys
  MOD_RES (10)..(10): Thr or Phospho-Thr
  See specification as filed for detailed description of substitutions and preferred embodiments
DANPLMACGTLTRRHQNGRA

SEQ ID NO: 1642 - protein, 20 aa, Artificial Sequence
  Description of Artificial Sequence: Synthetic peptide
  N-term H or Acetyl
  MOD_RES (8)..(8): Modified Cys
  MOD_RES (10)..(10): Thr or Phospho-Thr
  See specification as filed for detailed description of substitutions and preferred embodiments
DANPLMACGTLTRRHQNGRD

SEQ ID NO: 1643 - protein, 20 aa, Artificial Sequence
  Description of Artificial Sequence: Synthetic peptide
  N-term H or Acetyl
  MOD_RES (8)..(8): Modified Cys
  MOD_RES (10)..(10): Thr or Phospho-Thr
  See specification as filed for detailed description of substitutions and preferred embodiments
DANPLMACGTLTRRHQNGRE

SEQ ID NO: 1644 - protein, 20 aa, Artificial Sequence
  Description of Artificial Sequence: Synthetic peptide
  N-term H or Acetyl
  MOD_RES (8)..(8): Modified Cys
  MOD_RES (10)..(10): Thr or Phospho-Thr
  See specification as filed for detailed description of substitutions and preferred embodiments
DANPLMACGTLTRRHQNGRF

SEQ ID NO: 1645 - protein, 20 aa, Artificial Sequence
  Description of Artificial Sequence: Synthetic peptide
  N-term H or Acetyl
  MOD_RES (8)..(8): Modified Cys
  MOD_RES (10)..(10): Thr or Phospho-Thr
  See specification as filed for detailed description of substitutions and preferred embodiments
DANPLMACGTLTRRHQNGRG

SEQ ID NO: 1646 - protein, 20 aa, Artificial Sequence
  Description of Artificial Sequence: Synthetic peptide
  N-term H or Acetyl
  MOD_RES (8)..(8): Modified Cys
  MOD_RES (10)..(10): Thr or Phospho-Thr
  See specification as filed for detailed description of substitutions and preferred embodiments
DANPLMACGTLTRRHQNGRH

SEQ ID NO: 1647 - protein, 20 aa, Artificial Sequence
  Description of Artificial Sequence: Synthetic peptide
  N-term H or Acetyl
  MOD_RES (8)..(8): Modified Cys
  MOD_RES (10)..(10): Thr or Phospho-Thr
  See specification as filed for detailed description of substitutions and preferred embodiments
DANPLMACGTLTRRHQNGRI

SEQ ID NO: 1648 - protein, 20 aa, Artificial Sequence
  Description of Artificial Sequence: Synthetic peptide
  N-term H or Acetyl
  MOD_RES (8)..(8): Modified Cys
  MOD_RES (10)..(10): Thr or Phospho-Thr
  See specification as filed for detailed description of substitutions and preferred embodiments
DANPLMACGTLTRRHQNGRK

SEQ ID NO: 1649 - protein, 20 aa, Artificial Sequence
  Description of Artificial Sequence: Synthetic peptide
  N-term H or Acetyl
  MOD_RES (8)..(8): Modified Cys
  MOD_RES (10)..(10): Thr or Phospho-Thr
  See specification as filed for detailed description of substitutions and preferred embodiments
DANPLMACGTLTRRHQNGRL

SEQ ID NO: 1650 - protein, 20 aa, Artificial Sequence
  Description of Artificial Sequence: Synthetic peptide
  N-term H or Acetyl
  MOD_RES (8)..(8): Modified Cys
  MOD_RES (10)..(10): Thr or Phospho-Thr
  See specification as filed for detailed description of substitutions and preferred embodiments
DANPLMACGTLTRRHQNGRN

SEQ ID NO: 1651 - protein, 20 aa, Artificial Sequence
  Description of Artificial Sequence: Synthetic peptide
  N-term H or Acetyl
  MOD_RES (8)..(8): Modified Cys
  MOD_RES (10)..(10): Thr or Phospho-Thr
  See specification as filed for detailed description of substitutions and preferred embodiments
DANPLMACGTLTRRHQNGRP

SEQ ID NO: 1652 - protein, 20 aa, Artificial Sequence
  Description of Artificial Sequence: Synthetic peptide
  N-term H or Acetyl
  MOD_RES (8)..(8): Modified Cys
  MOD_RES (10)..(10): Thr or Phospho-Thr
  See specification as filed for detailed description of substitutions and preferred embodiments
DANPLMACGTLTRRHQNGRQ

SEQ ID NO: 1653 - protein, 20 aa, Artificial Sequence
  Description of Artificial Sequence: Synthetic peptide
  N-term H or Acetyl
  MOD_RES (8)..(8): Modified Cys
  MOD_RES (10)..(10): Thr or Phospho-Thr
  See specification as filed for detailed description of substitutions and preferred embodiments
DANPLMACGTLTRRHQNGRR

SEQ ID NO: 1654 - protein, 20 aa, Artificial Sequence
  Description of Artificial Sequence: Synthetic peptide
  N-term H or Acetyl
  MOD_RES (8)..(8): Modified Cys
  MOD_RES (10)..(10): Thr or Phospho-Thr
  See specification as filed for detailed description of substitutions and preferred embodiments
DANPLMACGTLTRRHQNGRV

SEQ ID NO: 1655 - protein, 20 aa, Artificial Sequence
  Description of Artificial Sequence: Synthetic peptide
  N-term H or Acetyl
  MOD_RES (8)..(8): Modified Cys
  MOD_RES (10)..(10): Thr or Phospho-Thr
  See specification as filed for detailed description of substitutions and preferred embodiments
DANPLMACGTLTRRHQNGRW

SEQ ID NO: 1656 - protein, 20 aa, Artificial Sequence
  Description of Artificial Sequence: Synthetic peptide
  N-term H or Acetyl
  MOD_RES (8)..(8): Modified Cys
  MOD_RES (10)..(10): Thr or Phospho-Thr
  See specification as filed for detailed description of substitutions and preferred embodiments
DANPLMACGTLTRRHQNGVF

SEQ ID NO: 1657 - protein, 20 aa, Artificial Sequence
  Description of Artificial Sequence: Synthetic peptide
  N-term H or Acetyl
  MOD_RES (8)..(8): Modified Cys
  MOD_RES (10)..(10): Thr or Phospho-Thr
  See specification as filed for detailed description of substitutions and preferred embodiments
DANPLMACGTLTRRHQNGWF

SEQ ID NO: 1658 - protein, 20 aa, Artificial Sequence
  Description of Artificial Sequence: Synthetic peptide
  N-term H or Acetyl
  MOD_RES (8)..(8): Modified Cys
  MOD_RES (10)..(10): Thr or Phospho-Thr
  See specification as filed for detailed description of substitutions and preferred embodiments
DANPLMACGTLTRRHQNHRF

SEQ ID NO: 1659 - protein, 20 aa, Artificial Sequence
  Description of Artificial Sequence: Synthetic peptide
  N-term H or Acetyl
  MOD_RES (8)..(8): Modified Cys
  MOD_RES (10)..(10): Thr or Phospho-Thr
  See specification as filed for detailed description of substitutions and preferred embodiments
DANPLMACGTLTRRHQNIRF

SEQ ID NO: 1660 - protein, 20 aa, Artificial Sequence
  Description of Artificial Sequence: Synthetic peptide
  N-term H or Acetyl
  MOD_RES (8)..(8): Modified Cys
  MOD_RES (10)..(10): Thr or Phospho-Thr
  See specification as filed for detailed description of substitutions and preferred embodiments
DANPLMACGTLTRRHQNKRF

SEQ ID NO: 1661 - protein, 20 aa, Artificial Sequence
  Description of Artificial Sequence: Synthetic peptide
  N-term H or Acetyl
  MOD_RES (8)..(8): Modified Cys
  MOD_RES (10)..(10): Thr or Phospho-Thr
  See specification as filed for detailed description of substitutions and preferred embodiments
DANPLMACGTLTRRHQNLRF

SEQ ID NO: 1662 - protein, 20 aa, Artificial Sequence
  Description of Artificial Sequence: Synthetic peptide
  N-term H or Acetyl
  MOD_RES (8)..(8): Modified Cys
  MOD_RES (10)..(10): Thr or Phospho-Thr
  See specification as filed for detailed description of substitutions and preferred embodiments
DANPLMACGTLTRRHQNNRF

SEQ ID NO: 1663 - protein, 20 aa, Artificial Sequence
  Description of Artificial Sequence: Synthetic peptide
  N-term H or Acetyl
  MOD_RES (8)..(8): Modified Cys
  MOD_RES (10)..(10): Thr or Phospho-Thr
  See specification as filed for detailed description of substitutions and preferred embodiments
DANPLMACGTLTRRHQNPRF

SEQ ID NO: 1664 - protein, 20 aa, Artificial Sequence
  Description of Artificial Sequence: Synthetic peptide
  N-term H or Acetyl
  MOD_RES (8)..(8): Modified Cys
  MOD_RES (10)..(10): Thr or Phospho-Thr
  See specification as filed for detailed description of substitutions and preferred embodiments
DANPLMACGTLTRRHQNQRF

SEQ ID NO: 1665 - protein, 20 aa, Artificial Sequence
  Description of Artificial Sequence: Synthetic peptide
  N-term H or Acetyl
  MOD_RES (8)..(8): Modified Cys
  MOD_RES (10)..(10): Thr or Phospho-Thr
  See specification as filed for detailed description of substitutions and preferred embodiments
DANPLMACGTLTRRHQNRRF

SEQ ID NO: 1666 - protein, 20 aa, Artificial Sequence
  Description of Artificial Sequence: Synthetic peptide
  N-term H or Acetyl
  MOD_RES (8)..(8): Modified Cys
  MOD_RES (10)..(10): Thr or Phospho-Thr
  See specification as filed for detailed description of substitutions and preferred embodiments
DANPLMACGTLTRRHQNVRF

SEQ ID NO: 1667 - protein, 20 aa, Artificial Sequence
  Description of Artificial Sequence: Synthetic peptide
  N-term H or Acetyl
  MOD_RES (8)..(8): Modified Cys
  MOD_RES (10)..(10): Thr or Phospho-Thr
  See specification as filed for detailed description of substitutions and preferred embodiments
DANPLMACGTLTRRHQNWRF

SEQ ID NO: 1668 - protein, 20 aa, Artificial Sequence
  Description of Artificial Sequence: Synthetic peptide
  N-term H or Acetyl
  MOD_RES (8)..(8): Modified Cys
  MOD_RES (10)..(10): Thr or Phospho-Thr
  See specification as filed for detailed description of substitutions and preferred embodiments
DANPLMACGTLTRRHQPGRF

SEQ ID NO: 1669 - protein, 20 aa, Artificial Sequence
  Description of Artificial Sequence: Synthetic peptide
  N-term H or Acetyl
  MOD_RES (8)..(8): Modified Cys
  MOD_RES (10)..(10): Thr or Phospho-Thr
  See specification as filed for detailed description of substitutions and preferred embodiments
DANPLMACGTLTRRHQQGRF

SEQ ID NO: 1670 - protein, 20 aa, Artificial Sequence
  Description of Artificial Sequence: Synthetic peptide
  N-term H or Acetyl
  MOD_RES (8)..(8): Modified Cys
  MOD_RES (10)..(10): Thr or Phospho-Thr
  See specification as filed for detailed description of substitutions and preferred embodiments
DANPLMACGTLTRRHQRGRF

SEQ ID NO: 1671 - protein, 20 aa, Artificial Sequence
  Description of Artificial Sequence: Synthetic peptide
  N-term H or Acetyl
  MOD_RES (8)..(8): Modified Cys
  MOD_RES (10)..(10): Thr or Phospho-Thr
  See specification as filed for detailed description of substitutions and preferred embodiments
DANPLMACGTLTRRHQVGRF

SEQ ID NO: 1672 - protein, 20 aa, Artificial Sequence
  Description of Artificial Sequence: Synthetic peptide
  N-term H or Acetyl
  MOD_RES (8)..(8): Modified Cys
  MOD_RES (10)..(10): Thr or Phospho-Thr
  See specification as filed for detailed description of substitutions and preferred embodiments
DANPLMACGTLTRRHQWGRF

SEQ ID NO: 1673 - protein, 20 aa, Artificial Sequence
  Description of Artificial Sequence: Synthetic peptide
  N-term H or Acetyl
  MOD_RES (8)..(8): Modified Cys
  MOD_RES (10)..(10): Thr or Phospho-Thr
  See specification as filed for detailed description of substitutions and preferred embodiments
DANPLMACGTLTRRHRNGRF

SEQ ID NO: 1674 - protein, 20 aa, Artificial Sequence
  Description of Artificial Sequence: Synthetic peptide
  N-term H or Acetyl
  MOD_RES (8)..(8): Modified Cys
  MOD_RES (10)..(10): Thr or Phospho-Thr
  See specification as filed for detailed description of substitutions and preferred embodiments
DANPLMACGTLTRRHVNGRF

SEQ ID NO: 1675 - protein, 20 aa, Artificial Sequence
  Description of Artificial Sequence: Synthetic peptide
  N-term H or Acetyl
  MOD_RES (8)..(8): Modified Cys
  MOD_RES (10)..(10): Thr or Phospho-Thr
  See specification as filed for detailed description of substitutions and preferred embodiments
DANPLMACGTLTRRHWNGRF

SEQ ID NO: 1676 - protein, 20 aa, Artificial Sequence
  Description of Artificial Sequence: Synthetic peptide
  N-term H or Acetyl
  MOD_RES (8)..(8): Modified Cys
  MOD_RES (10)..(10): Thr or Phospho-Thr
  See specification as filed for detailed description of substitutions and preferred embodiments
DANPLMACGTLTRRIQNGRF

SEQ ID NO: 1677 - protein, 20 aa, Artificial Sequence
  Description of Artificial Sequence: Synthetic peptide
  N-term H or Acetyl
  MOD_RES (8)..(8): Modified Cys
  MOD_RES (10)..(10): Thr or Phospho-Thr
  See specification as filed for detailed description of substitutions and preferred embodiments
DANPLMACGTLTRRKQNGRF

SEQ ID NO: 1678 - protein, 20 aa, Artificial Sequence
  Description of Artificial Sequence: Synthetic peptide
  N-term H or Acetyl
  MOD_RES (8)..(8): Modified Cys
  MOD_RES (10)..(10): Thr or Phospho-Thr
  See specification as filed for detailed description of substitutions and preferred embodiments
DANPLMACGTLTRRLQNGRF

SEQ ID NO: 1679 - protein, 20 aa, Artificial Sequence
  Description of Artificial Sequence: Synthetic peptide
  N-term H or Acetyl
  MOD_RES (8)..(8): Modified Cys
  MOD_RES (10)..(10): Thr or Phospho-Thr
  See specification as filed for detailed description of substitutions and preferred embodiments
DANPLMACGTLTRRNQNGRF

SEQ ID NO: 1680 - protein, 20 aa, Artificial Sequence
  Description of Artificial Sequence: Synthetic peptide
  N-term H or Acetyl
  MOD_RES (8)..(8): Modified Cys
  MOD_RES (10)..(10): Thr or Phospho-Thr
  See specification as filed for detailed description of substitutions and preferred embodiments
DANPLMACGTLTRRPQNGRF

SEQ ID NO: 1681 - protein, 20 aa, Artificial Sequence
  Description of Artificial Sequence: Synthetic peptide
  N-term H or Acetyl
  MOD_RES (8)..(8): Modified Cys
  MOD_RES (10)..(10): Thr or Phospho-Thr
  See specification as filed for detailed description of substitutions and preferred embodiments
DANPLMACGTLTRRQQNGRF

SEQ ID NO: 1682 - protein, 20 aa, Artificial Sequence
  Description of Artificial Sequence: Synthetic peptide
  N-term H or Acetyl
  MOD_RES (8)..(8): Modified Cys
  MOD_RES (10)..(10): Thr or Phospho-Thr
  See specification as filed for detailed description of substitutions and preferred embodiments
DANPLMACGTLTRRRQNGRF

SEQ ID NO: 1683 - protein, 20 aa, Artificial Sequence
  Description of Artificial Sequence: Synthetic peptide
  N-term H or Acetyl
  MOD_RES (8)..(8): Modified Cys
  MOD_RES (10)..(10): Thr or Phospho-Thr
  See specification as filed for detailed description of substitutions and preferred embodiments
DANPLMACGTLTRRVQNGRF

SEQ ID NO: 1684 - protein, 20 aa, Artificial Sequence
  Description of Artificial Sequence: Synthetic peptide
  N-term H or Acetyl
  MOD_RES (8)..(8): Modified Cys
  MOD_RES (10)..(10): Thr or Phospho-Thr
  See specification as filed for detailed description of substitutions and preferred embodiments
DANPLMACGTLTRRWQNGRF

SEQ ID NO: 1685 - protein, 20 aa, Artificial Sequence
  Description of Artificial Sequence: Synthetic peptide
  N-term H or Acetyl
  MOD_RES (8)..(8): Modified Cys
  MOD_RES (10)..(10): Thr or Phospho-Thr
  See specification as filed for detailed description of substitutions and preferred embodiments
DANPLMACGTLTRVHQNGRF

SEQ ID NO: 1686 - protein, 20 aa, Artificial Sequence
  Description of Artificial Sequence: Synthetic peptide
  N-term H or Acetyl
  MOD_RES (8)..(8): Modified Cys
  MOD_RES (10)..(10): Thr or Phospho-Thr
  See specification as filed for detailed description of substitutions and preferred embodiments
DANPLMACGTLTRWHQNGRF

SEQ ID NO: 1687 - protein, 20 aa, Artificial Sequence
  Description of Artificial Sequence: Synthetic peptide
  N-term H or Acetyl
  MOD_RES (8)..(8): Modified Cys
  MOD_RES (10)..(10): Thr or Phospho-Thr
  See specification as filed for detailed description of substitutions and preferred embodiments
DANPLMACGTLTVRHQNGRF

SEQ ID NO: 1688 - protein, 20 aa, Artificial Sequence
  Description of Artificial Sequence: Synthetic peptide
  N-term H or Acetyl
  MOD_RES (8)..(8): Modified Cys
  MOD_RES (10)..(10): Thr or Phospho-Thr
  See specification as filed for detailed description of substitutions and preferred embodiments
DANPLMACGTLTWRHQNGRF

SEQ ID NO: 1689 - protein, 20 aa, Artificial Sequence
  Description of Artificial Sequence: Synthetic peptide
  N-term H or Acetyl
  MOD_RES (8)..(8): Modified Cys
  MOD_RES (10)..(10): Thr or Phospho-Thr
  See specification as filed for detailed description of substitutions and preferred embodiments
DANPLMACGTLVRRHQNGRF

SEQ ID NO: 1690 - protein, 20 aa, Artificial Sequence
  Description of Artificial Sequence: Synthetic peptide
  N-term H or Acetyl
  MOD_RES (8)..(8): Modified Cys
  MOD_RES (10)..(10): Thr or Phospho-Thr
  See specification as filed for detailed description of substitutions and preferred embodiments
DANPLMACGTLWRRHQNGRF

SEQ ID NO: 1691 - protein, 20 aa, Artificial Sequence
  Description of Artificial Sequence: Synthetic peptide
  N-term H or Acetyl
  MOD_RES (8)..(8): Modified Cys
  MOD_RES (10)..(10): Thr or Phospho-Thr
  See specification as filed for detailed description of substitutions and preferred embodiments
DANPLMACGTNTRRHQNGRF

SEQ ID NO: 1692 - protein, 20 aa, Artificial Sequence
  Description of Artificial Sequence: Synthetic peptide
  N-term H or Acetyl
  MOD_RES (8)..(8): Modified Cys
  MOD_RES (10)..(10): Thr or Phospho-Thr
  See specification as filed for detailed description of substitutions and preferred embodiments
DANPLMACGTPTRRHQNGRF

SEQ ID NO: 1693 - protein, 20 aa, Artificial Sequence
  Description of Artificial Sequence: Synthetic peptide
  N-term H or Acetyl
  MOD_RES (8)..(8): Modified Cys
  MOD_RES (10)..(10): Thr or Phospho-Thr
  See specification as filed for detailed description of substitutions and preferred embodiments
DANPLMACGTQTRRHQNGRF

SEQ ID NO: 1694 - protein, 20 aa, Artificial Sequence
  Description of Artificial Sequence: Synthetic peptide
  N-term H or Acetyl
  MOD_RES (8)..(8): Modified Cys
  MOD_RES (10)..(10): Thr or Phospho-Thr
  See specification as filed for detailed description of substitutions and preferred embodiments
DANPLMACGTRTRRHQNGRF

SEQ ID NO: 1695 - protein, 20 aa, Artificial Sequence
  Description of Artificial Sequence: Synthetic peptide
  N-term H or Acetyl
  MOD_RES (8)..(8): Modified Cys
  MOD_RES (10)..(10): Thr or Phospho-Thr
  See specification as filed for detailed description of substitutions and preferred embodiments
DANPLMACGTVTRRHQNGRF

SEQ ID NO: 1696 - protein, 20 aa, Artificial Sequence
  Description of Artificial Sequence: Synthetic peptide
  N-term H or Acetyl
  MOD_RES (8)..(8): Modified Cys
  MOD_RES (10)..(10): Thr or Phospho-Thr
  See specification as filed for detailed description of substitutions and preferred embodiments
DANPLMACGTWTRRHQNGRF

SEQ ID NO: 1697 - protein, 20 aa, Artificial Sequence
  Description of Artificial Sequence: Synthetic peptide
  N-term H or Acetyl
  MOD_RES (8)..(8): Modified Cys
  MOD_RES (11)..(11): Leu or Nle (i.e. isomer of Leucine)
  See specification as filed for detailed description of substitutions and preferred embodiments
DANPLMACGTLTRRHQNGRF

SEQ ID NO: 1698 - protein, 20 aa, Artificial Sequence
  Description of Artificial Sequence: Synthetic peptide
  N-term H or Acetyl
  MOD_RES (8)..(8): Modified Cys
  MOD_RES (10)..(10): Thr or Phospho-Thr
  See specification as filed for detailed description of substitutions and preferred embodiments
DANPLMACHTLTRRHQNGRF

SEQ ID NO: 1699 - protein, 20 aa, Artificial Sequence
  Description of Artificial Sequence: Synthetic peptide
  N-term H or Acetyl
  MOD_RES (8)..(8): Modified Cys
  MOD_RES (10)..(10): Thr or Phospho-Thr
  See specification as filed for detailed description of substitutions and preferred embodiments
DANPLMACITLTRRHQNGRF

SEQ ID NO: 1700 - protein, 20 aa, Artificial Sequence
  Description of Artificial Sequence: Synthetic peptide
  N-term H or Acetyl
  MOD_RES (8)..(8): Modified Cys
  MOD_RES (10)..(10): Thr or Phospho-Thr
  See specification as filed for detailed description of substitutions and preferred embodiments
DANPLMACKTLTRRHQNGRF

SEQ ID NO: 1701 - protein, 20 aa, Artificial Sequence
  Description of Artificial Sequence: Synthetic peptide
  N-term H or Acetyl
  MOD_RES (8)..(8): Modified Cys
  MOD_RES (10)..(10): Thr or Phospho-Thr
  See specification as filed for detailed description of substitutions and preferred embodiments
DANPLMACLTLTRRHQNGRF

SEQ ID NO: 1702 - protein, 20 aa, Artificial Sequence
  Description of Artificial Sequence: Synthetic peptide
  N-term H or Acetyl
  MOD_RES (8)..(8): Modified Cys
  MOD_RES (10)..(10): Thr or Phospho-Thr
  See specification as filed for detailed description of substitutions and preferred embodiments
DANPLMACNTLTRRHQNGRF

SEQ ID NO: 1703 - protein, 20 aa, Artificial Sequence
  Description of Artificial Sequence: Synthetic peptide
  N-term H or Acetyl
  MOD_RES (8)..(8): Modified Cys
  MOD_RES (10)..(10): Thr or Phospho-Thr
  See specification as filed for detailed description of substitutions and preferred embodiments
DANPLMACPTLTRRHQNGRF

SEQ ID NO: 1704 - protein, 20 aa, Artificial Sequence
  Description of Artificial Sequence: Synthetic peptide
  N-term H or Acetyl
  MOD_RES (8)..(8): Modified Cys
  MOD_RES (10)..(10): Thr or Phospho-Thr
  See specification as filed for detailed description of substitutions and preferred embodiments
DANPLMACQTLTRRHQNGRF

SEQ ID NO: 1705 - protein, 20 aa, Artificial Sequence
  Description of Artificial Sequence: Synthetic peptide
  N-term H or Acetyl
  MOD_RES (8)..(8): Modified Cys
  MOD_RES (10)..(10): Thr or Phospho-Thr
  See specification as filed for detailed description of substitutions and preferred embodiments
DANPLMACRTLTRRHQNGRF

SEQ ID NO: 1706 - protein, 20 aa, Artificial Sequence
  Description of Artificial Sequence: Synthetic peptide
  N-term H or Acetyl
  MOD_RES (8)..(8): Modified Cys
  MOD_RES (10)..(10): Thr or Phospho-Thr
  See specification as filed for detailed description of substitutions and preferred embodiments
DANPLMACVTLTRRHQNGRF

SEQ ID NO: 1707 - protein, 20 aa, Artificial Sequence
  Description of Artificial Sequence: Synthetic peptide
  N-term H or Acetyl
  MOD_RES (8)..(8): Modified Cys
  MOD_RES (10)..(10): Thr or Phospho-Thr
  See specification as filed for detailed description of substitutions and preferred embodiments
DANPLMACWTLTRRHQNGRF

SEQ ID NO: 1708 - protein, 20 aa, Artificial Sequence
  Description of Artificial Sequence: Synthetic peptide
  N-term H or Acetyl
  MOD_RES (10)..(10): Thr or Phospho-Thr
  MOD_RES (12)..(12): Modified Cys
  See specification as filed for detailed description of substitutions and preferred embodiments
DANPLMANGTLCRRHQNGRF

SEQ ID NO: 1709 - protein, 20 aa, Artificial Sequence
  Description of Artificial Sequence: Synthetic peptide
  N-term H or Acetyl
  MOD_RES (7)..(7): Modified Cys
  MOD_RES (10)..(10): Thr or Phospho-Thr
  See specification as filed for detailed description of substitutions and preferred embodiments
DANPLMCNGTLARRHQNGRF

SEQ ID NO: 1710 - protein, 20 aa, Artificial Sequence
  Description of Artificial Sequence: Synthetic peptide
  N-term H or Acetyl
  MOD_RES (7)..(7): Modified Cys
  MOD_RES (10)..(10): Thr or Phospho-Thr
  See specification as filed for detailed description of substitutions and preferred embodiments
DANPLMCNGTLTRRHQNGRF

SEQ ID NO: 1711 - protein, 20 aa, Artificial Sequence
  Description of Artificial Sequence: Synthetic peptide
  N-term H or Acetyl
  MOD_RES (8)..(8): Modified Cys
  MOD_RES (10)..(10): Thr or Phospho-Thr
  See specification as filed for detailed description of substitutions and preferred embodiments
DANPLMDCGTLTRRHQNGRF

SEQ ID NO: 1712 - protein, 20 aa, Artificial Sequence
  Description of Artificial Sequence: Synthetic peptide
  N-term H or Acetyl
  MOD_RES (8)..(8): Modified Cys
  MOD_RES (10)..(10): Thr or Phospho-Thr
  See specification as filed for detailed description of substitutions and preferred embodiments
DANPLMECGTLTRRHQNGRF

SEQ ID NO: 1713 - protein, 20 aa, Artificial Sequence
  Description of Artificial Sequence: Synthetic peptide
  N-term H or Acetyl
  MOD_RES (8)..(8): Modified Cys
  MOD_RES (10)..(10): Thr or Phospho-Thr
  See specification as filed for detailed description of substitutions and preferred embodiments
DANPLMFCGTLTRRHQNGRF

SEQ ID NO: 1714 - protein, 20 aa, Artificial Sequence
  Description of Artificial Sequence: Synthetic peptide
  N-term H or Acetyl
  MOD_RES (8)..(8): Modified Cys
  MOD_RES (10)..(10): Thr or Phospho-Thr
  See specification as filed for detailed description of substitutions and preferred embodiments
DANPLMGCGTLTRRHQNGRF

SEQ ID NO: 1715 - protein, 20 aa, Artificial Sequence
  Description of Artificial Sequence: Synthetic peptide
  N-term H or Acetyl
  MOD_RES (8)..(8): Modified Cys
  MOD_RES (10)..(10): Thr or Phospho-Thr
  See specification as filed for detailed description of substitutions and preferred embodiments
DANPLMHCGTLTRRHQNGRF

SEQ ID NO: 1716 - protein, 20 aa, Artificial Sequence
  Description of Artificial Sequence: Synthetic peptide
  N-term H or Acetyl
  MOD_RES (8)..(8): Modified Cys
  MOD_RES (10)..(10): Thr or Phospho-Thr
  See specification as filed for detailed description of substitutions and preferred embodiments
DANPLMICGTLTRRHQNGRF

SEQ ID NO: 1717 - protein, 20 aa, Artificial Sequence
  Description of Artificial Sequence: Synthetic peptide
  N-term H or Acetyl
  MOD_RES (8)..(8): Modified Cys
  MOD_RES (10)..(10): Thr or Phospho-Thr
  See specification as filed for detailed description of substitutions and preferred embodiments
DANPLMKCGTLTRRHQNGRF

SEQ ID NO: 1718 - protein, 20 aa, Artificial Sequence
  Description of Artificial Sequence: Synthetic peptide
  N-term H or Acetyl
  MOD_RES (8)..(8): Modified Cys
  MOD_RES (10)..(10): Thr or Phospho-Thr
  See specification as filed for detailed description of substitutions and preferred embodiments
DANPLMLCGTLTRRHQNGRF

SEQ ID NO: 1719 - protein, 20 aa, Artificial Sequence
  Description of Artificial Sequence: Synthetic peptide
  N-term H or Acetyl
  MOD_RES (8)..(8): Modified Cys
  MOD_RES (10)..(10): Thr or Phospho-Thr
  See specification as filed for detailed description of substitutions and preferred embodiments
DANPLMNCGTLTRRHQNGRF

SEQ ID NO: 1720 - protein, 20 aa, Artificial Sequence
  Description of Artificial Sequence: Synthetic peptide
  N-term H or Acetyl
  MOD_RES (8)..(8): Modified Cys
  MOD_RES (10)..(10): Thr or Phospho-Thr
  See specification as filed for detailed description of substitutions and preferred embodiments
DANPLMPCGTLTRRHQNGRF

SEQ ID NO: 1721 - protein, 20 aa, Artificial Sequence
  Description of Artificial Sequence: Synthetic peptide
  N-term H or Acetyl
  MOD_RES (8)..(8): Modified Cys
  MOD_RES (10)..(10): Thr or Phospho-Thr
  See specification as filed for detailed description of substitutions and preferred embodiments
DANPLMQCGTLTRRHQNGRF

SEQ ID NO: 1722 - protein, 20 aa, Artificial Sequence
  Description of Artificial Sequence: Synthetic peptide
  N-term H or Acetyl
  MOD_RES (8)..(8): Modified Cys
  MOD_RES (10)..(10): Thr or Phospho-Thr
  See specification as filed for detailed description of substitutions and preferred embodiments
DANPLMRCGTLTRRHQNGRF

SEQ ID NO: 1723 - protein, 20 aa, Artificial Sequence
  Description of Artificial Sequence: Synthetic peptide
  N-term H or Acetyl
  MOD_RES (8)..(8): Modified Cys
  MOD_RES (10)..(10): Thr or Phospho-Thr
  See specification as filed for detailed description of substitutions and preferred embodiments
DANPLMVCGTLTRRHQNGRF

SEQ ID NO: 1724 - protein, 20 aa, Artificial Sequence
  Description of Artificial Sequence: Synthetic peptide
  N-term H or Acetyl
  MOD_RES (8)..(8): Modified Cys
  MOD_RES (10)..(10): Thr or Phospho-Thr
  See specification as filed for detailed description of substitutions and preferred embodiments
DANPLMWCGTLTRRHQNGRF

SEQ ID NO: 1725 - protein, 20 aa, Artificial Sequence
  Description of Artificial Sequence: Synthetic peptide
  N-term H or Acetyl
  MOD_RES (8)..(8): Modified Cys
  MOD_RES (10)..(10): Thr or Phospho-Thr
  See specification as filed for detailed description of substitutions and preferred embodiments
DANPLNACGTLTRRHQNGRF

SEQ ID NO: 1726 - protein, 20 aa, Artificial Sequence
  Description of Artificial Sequence: Synthetic peptide
  N-term H or Acetyl
  MOD_RES (8)..(8): Modified Cys
  MOD_RES (10)..(10): Thr or Phospho-Thr
  See specification as filed for detailed description of substitutions and preferred embodiments
DANPLPACGTLTRRHQNGRF

SEQ ID NO: 1727 - protein, 20 aa, Artificial Sequence
  Description of Artificial Sequence: Synthetic peptide
  N-term H or Acetyl
  MOD_RES (8)..(8): Modified Cys
  MOD_RES (10)..(10): Thr or Phospho-Thr
  See specification as filed for detailed description of substitutions and preferred embodiments
DANPLQACGTLTRRHQNGRF

SEQ ID NO: 1728 - protein, 20 aa, Artificial Sequence
  Description of Artificial Sequence: Synthetic peptide
  N-term H or Acetyl
  MOD_RES (8)..(8): Modified Cys
  MOD_RES (10)..(10): Thr or Phospho-Thr
  See specification as filed for detailed description of substitutions and preferred embodiments
DANPLRACGTLTRRHQNGRF

SEQ ID NO: 1729 - protein, 20 aa, Artificial Sequence
  Description of Artificial Sequence: Synthetic peptide
  N-term H or Acetyl
  MOD_RES (8)..(8): Modified Cys
  MOD_RES (10)..(10): Thr or Phospho-Thr
  See specification as filed for detailed description of substitutions and preferred embodiments
DANPLVACGTLTRRHQNGRF

SEQ ID NO: 1730 - protein, 20 aa, Artificial Sequence
  Description of Artificial Sequence: Synthetic peptide
  N-term H or Acetyl
  MOD_RES (8)..(8): Modified Cys
  MOD_RES (10)..(10): Thr or Phospho-Thr
  See specification as filed for detailed description of substitutions and preferred embodiments
DANPLWACGTLTRRHQNGRF

SEQ ID NO: 1731 - protein, 20 aa, Artificial Sequence
  Description of Artificial Sequence: Synthetic peptide
  N-term H or Acetyl
  MOD_RES (8)..(8): Modified Cys
  MOD_RES (10)..(10): Thr or Phospho-Thr
  See specification as filed for detailed description of substitutions and preferred embodiments
DANPNMACGTLTRRHQNGRF

SEQ ID NO: 1732 - protein, 20 aa, Artificial Sequence
  Description of Artificial Sequence: Synthetic peptide
  N-term H or Acetyl
  MOD_RES (8)..(8): Modified Cys
  MOD_RES (10)..(10): Thr or Phospho-Thr
  See specification as filed for detailed description of substitutions and preferred embodiments
DANPPMACGTLTRRHQNGRF

SEQ ID NO: 1733 - protein, 20 aa, Artificial Sequence
  Description of Artificial Sequence: Synthetic peptide
  N-term H or Acetyl
  MOD_RES (8)..(8): Modified Cys
  MOD_RES (10)..(10): Thr or Phospho-Thr
  See specification as filed for detailed description of substitutions and preferred embodiments
DANPQMACGTLTRRHQNGRF

SEQ ID NO: 1734 - protein, 20 aa, Artificial Sequence
  Description of Artificial Sequence: Synthetic peptide
  N-term H or Acetyl
  MOD_RES (8)..(8): Modified Cys
  MOD_RES (10)..(10): Thr or Phospho-Thr
  See specification as filed for detailed description of substitutions and preferred embodiments
DANPRMACGTLTRRHQNGRF

SEQ ID NO: 1735 - protein, 20 aa, Artificial Sequence
  Description of Artificial Sequence: Synthetic peptide
  N-term H or Acetyl
  MOD_RES (8)..(8): Modified Cys
  MOD_RES (10)..(10): Thr or Phospho-Thr
  See specification as filed for detailed description of substitutions and preferred embodiments
DANPVMACGTLTRRHQNGRF

SEQ ID NO: 1736 - protein, 20 aa, Artificial Sequence
  Description of Artificial Sequence: Synthetic peptide
  N-term H or Acetyl
  MOD_RES (8)..(8): Modified Cys
  MOD_RES (10)..(10): Thr or Phospho-Thr
  See specification as filed for detailed description of substitutions and preferred embodiments
DANPWMACGTLTRRHQNGRF

SEQ ID NO: 1737 - protein, 20 aa, Artificial Sequence
  Description of Artificial Sequence: Synthetic peptide
  N-term H or Acetyl
  MOD_RES (8)..(8): Modified Cys
  MOD_RES (10)..(10): Thr or Phospho-Thr
  See specification as filed for detailed description of substitutions and preferred embodiments
DANQLMACGTLTRRHQNGRF

SEQ ID NO: 1738 - protein, 20 aa, Artificial Sequence
  Description of Artificial Sequence: Synthetic peptide
  N-term H or Acetyl
  MOD_RES (8)..(8): Modified Cys
  MOD_RES (10)..(10): Thr or Phospho-Thr
  See specification as filed for detailed description of substitutions and preferred embodiments
DANRLMACGTLTRRHQNGRF

SEQ ID NO: 1739 - protein, 20 aa, Artificial Sequence
  Description of Artificial Sequence: Synthetic peptide
  N-term H or Acetyl
  MOD_RES (8)..(8): Modified Cys
  MOD_RES (10)..(10): Thr or Phospho-Thr
  See specification as filed for detailed description of substitutions and preferred embodiments
DANVLMACGTLTRRHQNGRF

SEQ ID NO: 1740 - protein, 20 aa, Artificial Sequence
  Description of Artificial Sequence: Synthetic peptide
  N-term H or Acetyl
  MOD_RES (8)..(8): Modified Cys
  MOD_RES (10)..(10): Thr or Phospho-Thr
  See specification as filed for detailed description of substitutions and preferred embodiments
DANWLMACGTLTRRHQNGRF

SEQ ID NO: 1741 - protein, 20 aa, Artificial Sequence
  Description of Artificial Sequence: Synthetic peptide
  N-term H or Acetyl
  MOD_RES (8)..(8): Modified Cys
  MOD_RES (10)..(10): Thr or Phospho-Thr
  See specification as filed for detailed description of substitutions and preferred embodiments
DAPPLMACGTLTRRHQNGRF

SEQ ID NO: 1742 - protein, 20 aa, Artificial Sequence
  Description of Artificial Sequence: Synthetic peptide
  N-term H or Acetyl
  MOD_RES (8)..(8): Modified Cys
  MOD_RES (10)..(10): Thr or Phospho-Thr
  See specification as filed for detailed description of substitutions and preferred embodiments
DAQPLMACGTLTRRHQNGRF

SEQ ID NO: 1743 - protein, 20 aa, Artificial Sequence
  Description of Artificial Sequence: Synthetic peptide
  N-term H or Acetyl
  MOD_RES (8)..(8): Modified Cys
  MOD_RES (10)..(10): Thr or Phospho-Thr
  See specification as filed for detailed description of substitutions and preferred embodiments
DARPLMACGTLTRRHQNGRF

SEQ ID NO: 1744 - protein, 20 aa, Artificial Sequence
  Description of Artificial Sequence: Synthetic peptide
  N-term H or Acetyl
  MOD_RES (8)..(8): Modified Cys
  MOD_RES (10)..(10): Thr or Phospho-Thr
  See specification as filed for detailed description of substitutions and preferred embodiments
DAVPLMACGTLTRRHQNGRF

SEQ ID NO: 1745 - protein, 20 aa, Artificial Sequence
  Description of Artificial Sequence: Synthetic peptide
  N-term H or Acetyl
  MOD_RES (8)..(8): Modified Cys
  MOD_RES (10)..(10): Thr or Phospho-Thr
  See specification as filed for detailed description of substitutions and preferred embodiments
DAWPLMACGTLTRRHQNGRF

SEQ ID NO: 1746 - protein, 10 aa, Artificial Sequence
  Description of Artificial Sequence: Synthetic peptide
  N-term H or Acetyl
  MOD_RES (2)..(2): Modified Cys
  MOD_RES (4)..(4): Ser or Phospho-Ser
  See specification as filed for detailed description of substitutions and preferred embodiments
DCDSLRRKAK

SEQ ID NO: 1747 - protein, 8 aa, Artificial Sequence
  Description of Artificial Sequence: Synthetic peptide
  N-term H or Acetyl
  MOD_RES (2)..(2): Modified Cys
  MOD_RES (4)..(4): Ser or Phospho-Ser
  See specification as filed for detailed description of substitutions and preferred embodiments
DCLSPGPF

SEQ ID NO: 1748 - protein, 15 aa, Artificial Sequence
  Description of Artificial Sequence: Synthetic peptide
  N-term H or Acetyl
  MOD_RES (10)..(10): Modified Cys
  See specification as filed for detailed description of substitutions and preferred embodiments
DDIEQWFTECPGPDE

SEQ ID NO: 1749 - protein, 20 aa, Artificial Sequence
  Description of Artificial Sequence: Synthetic peptide
  N-term H or Acetyl
  MOD_RES (8)..(8): Modified Cys
  MOD_RES (10)..(10): Thr or Phospho-Thr
  See specification as filed for detailed description of substitutions and preferred embodiments
DDNPLMACGTLTRRHQNGRF

SEQ ID NO: 1750 - protein, 19 aa, Artificial Sequence
  Description of Artificial Sequence: Synthetic peptide
  N-term H or Acetyl
  MOD_RES (3)..(3): Modified Cys
  MOD_RES (6)..(6): Thr or Phospho-Thr
  See specification as filed for detailed description of substitutions and preferred embodiments
DECEGTFRAAIRRLAARRR

SEQ ID NO: 1751 - protein, 19 aa, Artificial Sequence
  Description of Artificial Sequence: Synthetic peptide
  N-term H or Acetyl
  MOD_RES (3)..(3): Modified Cys
  MOD_RES (6)..(6): Thr or Phospho-Thr
  See specification as filed for detailed description of substitutions and preferred embodiments
DECEGTFRSSIRRLSSRRR

SEQ ID NO: 1752 - protein, 20 aa, Artificial Sequence
  Description of Artificial Sequence: Synthetic peptide
  N-term H or Acetyl
  MOD_RES (8)..(8): Modified Cys
  MOD_RES (10)..(10): Thr or Phospho-Thr
  See specification as filed for detailed description of substitutions and preferred embodiments
DENPLMACGTLTRRHQNGRF

SEQ ID NO: 1753 - protein, 20 aa, Artificial Sequence
  Description of Artificial Sequence: Synthetic peptide
  N-term H or Acetyl
  MOD_RES (9)..(9): Leu or Nle (i.e. isomer of Leucine)
  MOD_RES (10)..(10): Leu or Nle (i.e. isomer of Leucine)
  MOD_RES (11)..(11): Ser or Phospho-Ser
  MOD_RES (13)..(13): Modified Cys
  See specification as filed for detailed description of substitutions and preferred embodiments
DFGLSKWRLLSLCQSRSSKS

SEQ ID NO: 1754 - protein, 20 aa, Artificial Sequence
  Description of Artificial Sequence: Synthetic peptide
  N-term H or Acetyl
  MOD_RES (9)..(9): Leu or Nle (i.e. isomer of Leucine)
  MOD_RES (10)..(10): Leu or Nle (i.e. isomer of Leucine)
  MOD_RES (13)..(13): Modified Cys
  MOD_RES (15)..(15): Ser or Phospho-Ser
  See specification as filed for detailed description of substitutions and preferred embodiments
DFGLSKWRLLSLCQSRSSKS

SEQ ID NO: 1755 - protein, 20 aa, Artificial Sequence
  Description of Artificial Sequence: Synthetic peptide
  N-term H or Acetyl
  MOD_RES (11)..(11): Ser or Phospho-Ser
  MOD_RES (13)..(13): Modified Cys
  See specification as filed for detailed description of substitutions and preferred embodiments
DFGLSKWRMMSLCQSRSSKS

SEQ ID NO: 1756 - protein, 16 aa, Artificial Sequence
  Description of Artificial Sequence: Synthetic peptide
  N-term H or Acetyl
  MOD_RES (11)..(11): Ser or Phospho-Ser
  MOD_RES (13)..(13): Modified Cys
  See specification as filed for detailed description of substitutions and preferred embodiments
DFGLSKWRMMSLCQSR

SEQ ID NO: 1757 - protein, 14 aa, Artificial Sequence
  Description of Artificial Sequence: Synthetic peptide
  N-term H or Acetyl
  MOD_RES (11)..(11): Ser or Phospho-Ser
  MOD_RES (13)..(13): Modified Cys
  See specification as filed for detailed description of substitutions and preferred embodiments
DFGLSKWRMMSLCQ

SEQ ID NO: 1758 - protein, 20 aa, Artificial Sequence
  Description of Artificial Sequence: Synthetic peptide
  N-term H or Acetyl
  MOD_RES (13)..(13): Modified Cys
  MOD_RES (15)..(15): Ser or Phospho-Ser
  See specification as filed for detailed description of substitutions and preferred embodiments
DFGLSKWRMMSLCQSRSSKS

SEQ ID NO: 1759 - protein, 16 aa, Artificial Sequence
  Description of Artificial Sequence: Synthetic peptide
  N-term H or Acetyl
  MOD_RES (13)..(13): Modified Cys
  MOD_RES (15)..(15): Ser or Phospho-Ser
  See specification as filed for detailed description of substitutions and preferred embodiments
DFGLSKWRMMSLCQSR

SEQ ID NO: 1760 - protein, 20 aa, Artificial Sequence
  Description of Artificial Sequence: Synthetic peptide
  N-term H or Acetyl
  MOD_RES (8)..(8): Modified Cys
  MOD_RES (10)..(10): Thr or Phospho-Thr
  See specification as filed for detailed description of substitutions and preferred embodiments
DFNPLMACGTLTRRHQNGRF

SEQ ID NO: 1761 - protein, 20 aa, Artificial Sequence
  Description of Artificial Sequence: Synthetic peptide
  N-term H or Acetyl
  MOD_RES (8)..(8): Modified Cys
  MOD_RES (10)..(10): Thr or Phospho-Thr
  See specification as filed for detailed description of substitutions and preferred embodiments
DGNPLMACGTLTRRHQNGRF

SEQ ID NO: 1762 - protein, 20 aa, Artificial Sequence
  Description of Artificial Sequence: Synthetic peptide
  N-term H or Acetyl
  MOD_RES (8)..(8): Modified Cys
  MOD_RES (10)..(10): Thr or Phospho-Thr
  See specification as filed for detailed description of substitutions and preferred embodiments
DHNPLMACGTLTRRHQNGRF

SEQ ID NO: 1763 - protein, 20 aa, Artificial Sequence
  Description of Artificial Sequence: Synthetic peptide
  N-term H or Acetyl
  MOD_RES (8)..(8): Modified Cys
  MOD_RES (10)..(10): Thr or Phospho-Thr
  See specification as filed for detailed description of substitutions and preferred embodiments
DINPLMACGTLTRRHQNGRF

SEQ ID NO: 1764 - protein, 20 aa, Artificial Sequence
  Description of Artificial Sequence: Synthetic peptide
  N-term H or Acetyl
  MOD_RES (8)..(8): Modified Cys
  MOD_RES (10)..(10): Thr or Phospho-Thr
  See specification as filed for detailed description of substitutions and preferred embodiments
DKNPLMACGTLTRRHQNGRF

SEQ ID NO: 1765 - protein, 15 aa, Artificial Sequence
  Description of Artificial Sequence: Synthetic peptide
  N-term H or Acetyl
  MOD_RES (8)..(8): Thr or Phospho-Thr
  MOD_RES (10)..(10): Modified Cys
  See specification as filed for detailed description of substitutions and preferred embodiments
DKRPQRATSCVFAMF

SEQ ID NO: 1766 - protein, 30 aa, Artificial Sequence; identical to SEQ ID NO: 1049
  Description of Artificial Sequence: Synthetic polypeptide
  N-term H or Acetyl
  MOD_RES (9)..(9): Modified Cys
  MOD_RES (12)..(12): Ser or Phospho-Ser
  See specification as filed for detailed description of substitutions and preferred embodiments

SEQ ID NO: 1767 - protein, 27 aa, Artificial Sequence
  Description of Artificial Sequence: Synthetic peptide
  N-term H or Acetyl
  MOD_RES (12)..(12): Ser or Phospho-Ser
  MOD_RES (14)..(14): Modified Cys
  See specification as filed for detailed description of substitutions and preferred embodiments
DLGYAKDVDQGSLCTSFVGTLQYLAPE

SEQ ID NO: 1768 - protein, 27 aa, Artificial Sequence
  Description of Artificial Sequence: Synthetic peptide
  N-term H or Acetyl
  MOD_RES (14)..(14): Modified Cys
  MOD_RES (16)..(16): Ser or Phospho-Ser
  See specification as filed for detailed description of substitutions and preferred embodiments
DLGYAKDVDQGSLCTSFVGTLQYLAPE

SEQ ID NO: 1769 - protein, 27 aa, Artificial Sequence
  Description of Artificial Sequence: Synthetic peptide
  N-term H or Acetyl
  MOD_RES (16)..(16): Ser or Phospho-Ser
  MOD_RES (18)..(18): Modified Cys
  See specification as filed for detailed description of substitutions and preferred embodiments
DLGYAKDVDQGSLCTSFCGTLQYLAPE

SEQ ID NO: 1770 - protein, 27 aa, Artificial Sequence
  Description of Artificial Sequence: Synthetic peptide
  N-term H or Acetyl
  MOD_RES (18)..(18): Modified Cys
  MOD_RES (20)..(20): Thr or Phospho-Thr
  See specification as filed for detailed description of substitutions and preferred embodiments
DLGYAKDVDQGSLCTSFCGTLQYLAPE

SEQ ID NO: 1771 - protein, 17 aa, Artificial Sequence
  Description of Artificial Sequence: Synthetic peptide
  N-term H or Acetyl
  MOD_RES (4)..(4): Leu or Nle (i.e. isomer of Leucine)
  MOD_RES (10)..(10): Modified Cys
  MOD_RES (12)..(12): Ser or Phospho-Ser
  See specification as filed for detailed description of substitutions and preferred embodiments
DLILKEDYECVSTKPTR

SEQ ID NO: 1772 - protein, 17 aa, Artificial Sequence
  Description of Artificial Sequence: Synthetic peptide
  N-term H or Acetyl
  MOD_RES (10)..(10): Modified Cys
  MOD_RES (12)..(12): Ser or Phospho-Ser
  See specification as filed for detailed description of substitutions and preferred embodiments
DLIMKEDYECVSTKPTR

SEQ ID NO: 1773 - protein, 12 aa, Artificial Sequence
  Description of Artificial Sequence: Synthetic peptide
  N-term H or Acetyl
  MOD_RES (5)..(5): Modified Cys
  MOD_RES (7)..(7): Ser or Phospho-Ser
  See specification as filed for detailed description of substitutions and preferred embodiments
DLLRCSSRRIRR

SEQ ID NO: 1774 - protein, 20 aa, Artificial Sequence
  Description of Artificial Sequence: Synthetic peptide
  N-term H or Acetyl
  MOD_RES (8)..(8): Modified Cys
  MOD_RES (10)..(10): Thr or Phospho-Thr
  See specification as filed for detailed description of substitutions and preferred embodiments
DLNPLMACGTLTRRHQNGRF

SEQ ID NO: 1775 - protein, 18 aa, Artificial Sequence
  Description of Artificial Sequence: Synthetic peptide
  N-term H or Acetyl
  MOD_RES (6)..(6): Modified Cys
  MOD_RES (8)..(8): Thr or Phospho-Thr
  See specification as filed for detailed description of substitutions and preferred embodiments
DLPDMCETKYTVDKRFGM

SEQ ID NO: 1776 - protein, 18 aa, Artificial Sequence
  Description of Artificial Sequence: Synthetic peptide
  N-term H or Acetyl
  MOD_RES (8)..(8): Thr or Phospho-Thr
  MOD_RES (10)..(10): Modified Cys
  See specification as filed for detailed description of substitutions and preferred embodiments
DLPDMKETKCTVDKRFGM

SEQ ID NO: 1777 - protein, 18 aa, Artificial Sequence
  Description of Artificial Sequence: Synthetic peptide
  N-term H or Acetyl
  MOD_RES (9)..(9): Modified Cys
  MOD_RES (11)..(11): Thr or Phospho-Thr
  See specification as filed for detailed description of substitutions and preferred embodiments
DLPDMKETCYTVDKRFGM

SEQ ID NO: 1778 - protein, 18 aa, Artificial Sequence
  Description of Artificial Sequence: Synthetic peptide
  N-term H or Acetyl
  MOD_RES (11)..(11): Thr or Phospho-Thr
  MOD_RES (13)..(13): Modified Cys
  See specification as filed for detailed description of substitutions and preferred embodiments
DLPDMKETKYTVCKRFGM

SEQ ID NO: 1779 - protein, 21 aa, Artificial Sequence
  Description of Artificial Sequence: Synthetic peptide
  N-term H or Acetyl
  MOD_RES (7)..(7): Modified Cys
  MOD_RES (9)..(9): Thr or Phospho-Thr
  See specification as filed for detailed description of substitutions and preferred embodiments
DLPWWRCYTWVVERDVNTKQR

SEQ ID NO: 1780 - protein, 20 aa, Artificial Sequence
  Description of Artificial Sequence: Synthetic peptide
  N-term H or Acetyl
  MOD_RES (8)..(8): Modified Cys
  MOD_RES (10)..(10): Thr or Phospho-Thr
  See specification as filed for detailed description of substitutions and preferred embodiments
DNNPLMACGTLTRRHQNGRF

SEQ ID NO: 1781 - protein, 18 aa, Artificial Sequence
  Description of Artificial Sequence: Synthetic peptide
  N-term H or Acetyl
  MOD_RES (6)..(6): Modified Cys
  MOD_RES (8)..(8): Ser or Phospho-Ser
  See specification as filed for detailed description of substitutions and preferred embodiments
DPLPPCFSGTPKGSGKKK

SEQ ID NO: 1782 - protein, 20 aa, Artificial Sequence
  Description of Artificial Sequence: Synthetic peptide
  N-term H or Acetyl
  MOD_RES (8)..(8): Modified Cys
  MOD_RES (10)..(10): Thr or Phospho-Thr
  See specification as filed for detailed description of substitutions and preferred embodiments
DPNPLMACGTLTRRHQNGRF

SEQ ID NO: 1783 - protein, 15 aa, Artificial Sequence
  Description of Artificial Sequence: Synthetic peptide
  N-term H or Acetyl
  MOD_RES (8)..(8): Thr or Phospho-Thr
  MOD_RES (10)..(10): Modified Cys
  See specification as filed for detailed description of substitutions and preferred embodiments
DPQLPSRTPCQGPRP

SEQ ID NO: 1784 - protein, 15 aa, Artificial Sequence
  Description of Artificial Sequence: Synthetic peptide
  N-term H or Acetyl
  MOD_RES (6)..(6): Modified Cys
  MOD_RES (8)..(8): Ser or Phospho-Ser
  See specification as filed for detailed description of substitutions and preferred embodiments
DPRGDCHSPIVLGRP

SEQ ID NO: 1785 - protein, 15 aa, Artificial Sequence
  Description of Artificial Sequence: Synthetic peptide
  N-term H or Acetyl
  MOD_RES (8)..(8): Ser or Phospho-Ser
  MOD_RES (10)..(10): Modified Cys
  See specification as filed for detailed description of substitutions and preferred embodiments
DPRGDFHSPCVLGRP

SEQ ID NO: 1786 - protein, 20 aa, Artificial Sequence
  Description of Artificial Sequence: Synthetic peptide
  N-term H or Acetyl
  MOD_RES (8)..(8): Modified Cys
  MOD_RES (10)..(10): Thr or Phospho-Thr
  See specification as filed for detailed description of substitutions and preferred embodiments
DQNPLMACGTLTRRHQNGRF

SEQ ID NO: 1787 - protein, 15 aa, Artificial Sequence
  Description of Artificial Sequence: Synthetic peptide
  N-term H or Acetyl
  MOD_RES (10)..(10): Ser or Phospho-Ser
  MOD_RES (12)..(12): Modified Cys
  See specification as filed for detailed description of substitutions and preferred embodiments
DQREGFGRQSMCEKR

SEQ ID NO: 1788 - protein, 20 aa, Artificial Sequence
  Description of Artificial Sequence: Synthetic peptide
  N-term H or Acetyl
  MOD_RES (8)..(8): Modified Cys
  MOD_RES (10)..(10): Thr or Phospho-Thr
  See specification as filed for detailed description of substitutions and preferred embodiments
DRNPLMACGTLTRRHQNGRF

SEQ ID NO: 1789 - protein, 10 aa, Artificial Sequence
  Description of Artificial Sequence: Synthetic peptide
  N-term H or Acetyl
  MOD_RES (4)..(4): Modified Cys
  MOD_RES (6)..(6): Ser or Phospho-Ser
  See specification as filed for detailed description of substitutions and preferred embodiments
DRRCASFRRR

SEQ ID NO: 1790 - protein, 15 aa, Artificial Sequence
  Description of Artificial Sequence: Synthetic peptide
  N-term H or Acetyl
  MOD_RES (4)..(4): Ser or Phospho-Ser
  MOD_RES (6)..(6): Modified Cys
  See specification as filed for detailed description of substitutions and preferred embodiments
DRVSRCSSPLKTGEQ

SEQ ID NO: 1791 - protein, 15 aa, Artificial Sequence
  Description of Artificial Sequence: Synthetic peptide
  N-term H or Acetyl
  MOD_RES (6)..(6): Modified Cys
  MOD_RES (8)..(8): Ser or Phospho-Ser
  See specification as filed for detailed description of substitutions and preferred embodiments
DRVSRCSSPLKTGEQ

SEQ ID NO: 1792 - protein, 15 aa, Artificial Sequence
  Description of Artificial Sequence: Synthetic peptide
  N-term H or Acetyl
  MOD_RES (8)..(8): Ser or Phospho-Ser
  MOD_RES (10)..(10): Modified Cys
  See specification as filed for detailed description of substitutions and preferred embodiments
DSLSYYHSPCDSFSS

SEQ ID NO: 1793 - protein, 15 aa, Artificial Sequence
  Description of Artificial Sequence: Synthetic peptide
  N-term H or Acetyl
  MOD_RES (10)..(10): Modified Cys
  MOD_RES (12)..(12): Ser or Phospho-Ser
  See specification as filed for detailed description of substitutions and preferred embodiments
DSLSYYHSPCDSFSS

SEQ ID NO: 1794 - protein, 20 aa, Artificial Sequence
  Description of Artificial Sequence: Synthetic peptide
  N-term H or Acetyl
  MOD_RES (8)..(8): Modified Cys
  MOD_RES (10)..(10): Thr or Phospho-Thr
  See specification as filed for detailed description of substitutions and preferred embodiments
DVNPLMACGTLTRRHQNGRF

SEQ ID NO: 1795 - protein, 20 aa, Artificial Sequence
  Description of Artificial Sequence: Synthetic peptide
  N-term H or Acetyl
  MOD_RES (8)..(8): Modified Cys
  MOD_RES (10)..(10): Thr or Phospho-Thr
  See specification as filed for detailed description of substitutions and preferred embodiments
DWNPLMACGTLTRRHQNGRF

SEQ ID NO: 1796 - protein, 18 aa, Artificial Sequence
  Description of Artificial Sequence: Synthetic peptide
  N-term H or Acetyl
  MOD_RES (14)..(14): Ser or Phospho-Ser
  MOD_RES (16)..(16): Modified Cys
  See specification as filed for detailed description of substitutions and preferred embodiments
EAKTTKKRPQRATSNCFS

SEQ ID NO: 1797 - protein, 18 aa, Artificial Sequence
  Description of Artificial Sequence: Synthetic peptide
  N-term H or Acetyl
  MOD_RES (16)..(16): Modified Cys
  MOD_RES (18)..(18): Ser or Phospho-Ser
  See specification as filed for detailed description of substitutions and preferred embodiments
EAKTTKKRPQRATSNCFS

SEQ ID NO: 1798 - protein, 20 aa, Artificial Sequence
  Description of Artificial Sequence: Synthetic peptide
  N-term H or Acetyl
  MOD_RES (8)..(8): Modified Cys
  MOD_RES (10)..(10): Thr or Phospho-Thr
  See specification as filed for detailed description of substitutions and preferred embodiments
EANPLMACGTLTRRHQNGRF

SEQ ID NO: 1799 - protein, 10 aa, Artificial Sequence
  Description of Artificial Sequence: Synthetic peptide
  N-term H or Acetyl
  MOD_RES (2)..(2): Modified Cys
  MOD_RES (4)..(4): Ser or Phospho-Ser
  See specification as filed for detailed description of substitutions and preferred embodiments
ECDSLRRKAK

SEQ ID NO: 1800 - protein, 8 aa, Artificial Sequence
  Description of Artificial Sequence: Synthetic peptide
  N-term H or Acetyl
  MOD_RES (2)..(2): Modified Cys
  MOD_RES (4)..(4): Ser or Phospho-Ser
  See specification as filed for detailed description of substitutions and preferred embodiments
ECLSPGPF

SEQ ID NO: 1801 - protein, 20 aa, Artificial Sequence
  Description of Artificial Sequence: Synthetic peptide
  N-term H or Acetyl
  MOD_RES (5)..(5): Ser or Phospho-Ser
  MOD_RES (7)..(7): Modified Cys
  See specification as filed for detailed description of substitutions and preferred embodiments
EDFSSICDMDFSALLSQISS

SEQ ID NO: 1802 - protein, 10 aa, Artificial Sequence
  Description of Artificial Sequence: Synthetic peptide
  N-term H or Acetyl
  MOD_RES (7)..(7): Modified Cys
  MOD_RES (9)..(9): Ser or Phospho-Ser
  See specification as filed for detailed description of substitutions and preferred embodiments
EDPDYECPSA

SEQ ID NO: 1803 - protein, 15 aa, Artificial Sequence
  Description of Artificial Sequence: Synthetic peptide
  N-term H or Acetyl
  MOD_RES (5)..(5): Modified Cys
  MOD_RES (8)..(8): Ser or Phospho-Ser
  See specification as filed for detailed description of substitutions and preferred embodiments
EENVCDGSPNAGSVE

SEQ ID NO: 1804 - protein, 15 aa, Artificial Sequence
  Description of Artificial Sequence: Synthetic peptide
  N-term H or Acetyl
  MOD_RES (8)..(8): Ser or Phospho-Ser
  MOD_RES (10)..(10): Modified Cys
  See specification as filed for detailed description of substitutions and preferred embodiments
EENVSDGSPCAGSVE

SEQ ID NO: 1805 - protein, 15 aa, Artificial Sequence
  Description of Artificial Sequence: Synthetic peptide
  N-term H or Acetyl
  MOD_RES (6)..(6): Modified Cys
  MOD_RES (8)..(8): Ser or Phospho-Ser
  See specification as filed for detailed description of substitutions and preferred embodiments
EEYETCESPVPPARS

SEQ ID NO: 1806 - protein, 15 aa, Artificial Sequence
  Description of Artificial Sequence: Synthetic peptide
  N-term H or Acetyl
  MOD_RES (8)..(8): Ser or Phospho-Ser
  MOD_RES (10)..(10): Modified Cys
  See specification as filed for detailed description of substitutions and preferred embodiments
EEYETPESPCPPARS

SEQ ID NO: 1807 - protein, 20 aa, Artificial Sequence
  Description of Artificial Sequence: Synthetic peptide
  N-term H or Acetyl
  MOD_RES (5)..(5): Modified Cys
  MOD_RES (7)..(7): Ser or Phospho-Ser
  See specification as filed for detailed description of substitutions and preferred embodiments
EGMICLSESSRRRIRSGNKL

SEQ ID NO: 1808 - protein, 20 aa, Artificial Sequence
  Description of Artificial Sequence: Synthetic peptide
  N-term H or Acetyl
  MOD_RES (7)..(7): Ser or Phospho-Ser
  MOD_RES (9)..(9): Modified Cys
  See specification as filed for detailed description of substitutions and preferred embodiments
EGMILLSECSRRRIRSGNKL

SEQ ID NO: 1809 - protein, 15 aa, Artificial Sequence
  Description of Artificial Sequence: Synthetic peptide
  N-term H or Acetyl
  MOD_RES (8)..(8): Ser or Phospho-Ser
  MOD_RES (10)..(10): Modified Cys
  See specification as filed for detailed description of substitutions and preferred embodiments
EIRSRHSSYCAGTED

SEQ ID NO: 1810 - protein, 15 aa, Artificial Sequence
  Description of Artificial Sequence: Synthetic peptide
  N-term H or Acetyl
  MOD_RES (8)..(8): Ser or Phospho-Ser
  MOD_RES (10)..(10): Modified Cys
  See specification as filed for detailed description of substitutions and preferred embodiments
EKGPEGVSPCQAHLH

SEQ ID NO: 1811 - protein, 15 aa, Artificial Sequence
  Description of Artificial Sequence: Synthetic peptide
  N-term H or Acetyl
  MOD_RES (8)..(8): Thr or Phospho-Thr
  MOD_RES (10)..(10): Modified Cys
  See specification as filed for detailed description of substitutions and preferred embodiments
EKRPQRATSCVFAMF

SEQ ID NO: 1812 - protein, 12 aa, Artificial Sequence
  Description of Artificial Sequence: Synthetic peptide
  N-term H or Acetyl
  MOD_RES (5)..(5): Modified Cys
  MOD_RES (7)..(7): Ser or Phospho-Ser
  See specification as filed for detailed description of substitutions and preferred embodiments
ELLRCSSRRIRR

SEQ ID NO: 1813 - protein, 21 aa, Artificial Sequence
  Description of Artificial Sequence: Synthetic peptide
  N-term H or Acetyl
  MOD_RES (7)..(7): Modified Cys
  MOD_RES (9)..(9): Thr or Phospho-Thr
  See specification as filed for detailed description of substitutions and preferred embodiments
ELPWWRCYTWVVERDVNTKQR

SEQ ID NO: 1814 - protein, 19 aa, Artificial Sequence
  Description of Artificial Sequence: Synthetic peptide
  N-term H or Acetyl
  MOD_RES (6)..(6): Modified Cys
  MOD_RES (8)..(8): Ser or Phospho-Ser
  MOD_RES (9)..(9): Leu or Nle (i.e. isomer of Leucine)
  See specification as filed for detailed description of substitutions and preferred embodiments
ELRKTCTSLSLGTTREKTD

SEQ ID NO: 1815 - protein, 19 aa, Artificial Sequence
  Description of Artificial Sequence: Synthetic peptide
  N-term H or Acetyl
  MOD_RES (9)..(9): Leu or Nle (i.e. isomer of Leucine)
  MOD_RES (10)..(10): Ser or Phospho-Ser
  MOD_RES (12)..(12): Modified Cys
  See specification as filed for detailed description of substitutions and preferred embodiments
ELRKTQTSLSLCTTREKTD

SEQ ID NO: 1816 - protein, 19 aa, Artificial Sequence
  Description of Artificial Sequence: Synthetic peptide
  N-term H or Acetyl
  MOD_RES (9)..(9): Leu or Nle (i.e. isomer of Leucine)
  MOD_RES (12)..(12): Modified Cys
  MOD_RES (14)..(14): Thr or Phospho-Thr
  See specification as filed for detailed description of substitutions and preferred embodiments
ELRKTQTSLSLCTTREKTD

SEQ ID NO: 1817 - protein, 18 aa, Artificial Sequence
  Description of Artificial Sequence: Synthetic peptide
  N-term H or Acetyl
  MOD_RES (5)..(5): Modified Cys
  MOD_RES (7)..(7): Ser or Phospho-Ser
  See specification as filed for detailed description of substitutions and preferred embodiments
EPAACISPLGALQHGFFR

SEQ ID NO: 1818 - protein, 18 aa, Artificial Sequence
  Description of Artificial Sequence: Synthetic peptide
  N-term H or Acetyl
  MOD_RES (7)..(7): Ser or Phospho-Ser
  MOD_RES (9)..(9): Modified Cys
  See specification as filed for detailed description of substitutions and preferred embodiments
EPAARISPCGALQHGFFR

SEQ ID NO: 1819 - protein, 15 aa, Artificial Sequence
  Description of Artificial Sequence: Synthetic peptide
  N-term H or Acetyl
  MOD_RES (3)..(3): Modified Cys
  MOD_RES (5)..(5): Ser or Phospho-Ser
  See specification as filed for detailed description of substitutions and preferred embodiments
EPCLSQEAFADLWKK

SEQ ID NO: 1820 - protein, 15 aa, Artificial Sequence
  Description of Artificial Sequence: Synthetic peptide
  N-term H or Acetyl
  MOD_RES (3)..(3): Modified Cys
  MOD_RES (5)..(5): Ser or Phospho-Ser
  See specification as filed for detailed description of substitutions and preferred embodiments
EPCLSQETFSDLWKK

SEQ ID NO: 1821 - protein, 15 aa, Artificial Sequence
  Description of Artificial Sequence: Synthetic peptide
  N-term H or Acetyl
  MOD_RES (3)..(3): Modified Cys
  MOD_RES (5)..(5): Ser or Phospho-Ser
  See specification as filed for detailed description of substitutions and preferred embodiments
EPCQSQEAFADLWKK

SEQ ID NO: 1822 - protein, 14 aa, Artificial Sequence
  Description of Artificial Sequence: Synthetic peptide
  N-term H or Acetyl
  MOD_RES (3)..(3): Modified Cys
  MOD_RES (5)..(5): Ser or Phospho-Ser
  See specification as filed for detailed description of substitutions and preferred embodiments
EPCQSQETFSDLWK

SEQ ID NO: 1823 - protein, 15 aa, Artificial Sequence
  Description of Artificial Sequence: Synthetic peptide
  N-term H or Acetyl
  MOD_RES (8)..(8): Ser or Phospho-Ser
  MOD_RES (10)..(10): Modified Cys
  See specification as filed for detailed description of substitutions and preferred embodiments
EPGPVPSSPCQEPPT

SEQ ID NO: 1824 - protein, 15 aa, Artificial Sequence
  Description of Artificial Sequence: Synthetic peptide
  N-term H or Acetyl
  MOD_RES (10)..(10): Modified Cys
  MOD_RES (12)..(12): Thr or Phospho-Thr
  See specification as filed for detailed description of substitutions and preferred embodiments
EPIQEANYVCMTPGT

SEQ ID NO: 1825 - protein, 15 aa, Artificial Sequence
  Description of Artificial Sequence: Synthetic peptide
  N-term H or Acetyl
  MOD_RES (6)..(6): Modified Cys
  MOD_RES (8)..(8): Thr or Phospho-Thr
  See specification as filed for detailed description of substitutions and preferred embodiments
EPPPRCKTPEIFRAL

SEQ ID NO: 1826 - protein, 15 aa, Artificial Sequence
  Description of Artificial Sequence: Synthetic peptide
  N-term H or Acetyl
  MOD_RES (8)..(8): Thr or Phospho-Thr
  MOD_RES (10)..(10): Modified Cys
  See specification as filed for detailed description of substitutions and preferred embodiments
EPPPRPKTPCIFRAL

SEQ ID NO: 1827 - protein, 15 aa, Artificial Sequence
  Description of Artificial Sequence: Synthetic peptide
  N-term H or Acetyl
  MOD_RES (10)..(10): Ser or Phospho-Ser
  MOD_RES (12)..(12): Modified Cys
  See specification as filed for detailed description of substitutions and preferred embodiments
EQREGFGRQSMCEKR

SEQ ID NO: 1828 - protein, 10 aa, Artificial Sequence
  Description of Artificial Sequence: Synthetic peptide
  N-term H or Acetyl
  MOD_RES (4)..(4): Modified Cys
  MOD_RES (6)..(6): Ser or Phospho-Ser
  See specification as filed for detailed description of substitutions and preferred embodiments
ERRCASFRRR

SEQ ID NO: 1829 - protein, 14 aa, Artificial Sequence
  Description of Artificial Sequence: Synthetic peptide
  N-term H or Acetyl
  MOD_RES (7)..(7): Ser or Phospho-Ser
  MOD_RES (9)..(9): Modified Cys
  See specification as filed for detailed description of substitutions and preferred embodiments
ESPEKVSPCKISDF

SEQ ID NO: 1830 - protein, 16 aa, Artificial Sequence
  Description of Artificial Sequence: Synthetic peptide
  N-term H or Acetyl
  MOD_RES (3)..(3): Modified Cys
  MOD_RES (5)..(5): Thr or Phospho-Thr
  See specification as filed for detailed description of substitutions and preferred embodiments
ETCSTQELYSIPEDQE

SEQ ID NO: 1831 - protein, 15 aa, Artificial Sequence
  Description of Artificial Sequence: Synthetic peptide
  N-term H or Acetyl
  MOD_RES (8)..(8): Thr or Phospho-Thr
  MOD_RES (10)..(10): Modified Cys
  See specification as filed for detailed description of substitutions and preferred embodiments
EVPDVTATPCRLLFF

SEQ ID NO: 1832 - protein, 15 aa, Artificial Sequence
  Description of Artificial Sequence: Synthetic peptide
  N-term H or Acetyl
  MOD_RES (8)..(8): Thr or Phospho-Thr
  MOD_RES (10)..(10): Modified Cys
  See specification as filed for detailed description of substitutions and preferred embodiments
EYSLPALTPCLDEVK

SEQ ID NO: 1833 - protein, 15 aa, Artificial Sequence
  Description of Artificial Sequence: Synthetic peptide
  N-term H or Acetyl
  MOD_RES (8)..(8): Thr or Phospho-Thr
  MOD_RES (11)..(11): Modified Cys
  See specification as filed for detailed description of substitutions and preferred embodiments
EYSLPALTPGCDEVK

SEQ ID NO: 1834 - protein, 15 aa, Artificial Sequence
  Description of Artificial Sequence: Synthetic peptide
  N-term H or Acetyl
  MOD_RES (6)..(6): Modified Cys
  MOD_RES (8)..(8): Thr or Phospho-Thr
  See specification as filed for detailed description of substitutions and preferred embodiments
EYSLPCLTPGLDEVK

SEQ ID NO: 1835 - protein, 15 aa, Artificial Sequence
  Description of Artificial Sequence: Synthetic peptide
  N-term H or Acetyl
  MOD_RES (2)..(2): Leu or Nle (i.e. isomer of Leucine)
  MOD_RES (10)..(10): Ser or Phospho-Ser
  MOD_RES (12)..(12): Modified Cys
  See specification as filed for detailed description of substitutions and preferred embodiments
FLREGFGRQSMCEKR

SEQ ID NO: 1836 - protein, 18 aa, Artificial Sequence
  Description of Artificial Sequence: Synthetic peptide
  N-term H or Acetyl
  MOD_RES (14)..(14): Ser or Phospho-Ser
  MOD_RES (16)..(16): Modified Cys
  See specification as filed for detailed description of substitutions and preferred embodiments
FAKTTKKRPQRATSNCFS

SEQ ID NO: 1837 - protein, 18 aa, Artificial Sequence
  Description of Artificial Sequence: Synthetic peptide
  N-term H or Acetyl
  MOD_RES (16)..(16): Modified Cys
  MOD_RES (18)..(18): Ser or Phospho-Ser
  See specification as filed for detailed description of substitutions and preferred embodiments
FAKTTKKRPQRATSNCFS

SEQ ID NO: 1838 - protein, 20 aa, Artificial Sequence
  Description of Artificial Sequence: Synthetic peptide
  N-term H or Acetyl
  MOD_RES (8)..(8): Modified Cys
  MOD_RES (10)..(10): Thr or Phospho-Thr
  See specification as filed for detailed description of substitutions and preferred embodiments
FANPLMACGTLTRRHQNGRF

SEQ ID NO: 1839 - protein, 15 aa, Artificial Sequence
  Description of Artificial Sequence: Synthetic peptide
  N-term H or Acetyl
  MOD_RES (10)..(10): Ser or Phospho-Ser
  MOD_RES (12)..(12): Modified Cys
  See specification as filed for detailed description of substitutions and preferred embodiments
FAREGFGRQSMCEKR

SEQ ID NO: 1840 - protein, 10 aa, Artificial Sequence
  Description of Artificial Sequence: Synthetic peptide
  N-term H or Acetyl
  MOD_RES (2)..(2): Modified Cys
  MOD_RES (4)..(4): Ser or Phospho-Ser
  See specification as filed for detailed description of substitutions and preferred embodiments
FCDSLRRKAK

SEQ ID NO: 1841 - protein, 8 aa, Artificial Sequence
  Description of Artificial Sequence: Synthetic peptide
  N-term H or Acetyl
  MOD_RES (2)..(2): Modified Cys
  MOD_RES (4)..(4): Ser or Phospho-Ser
  See specification as filed for detailed description of substitutions and preferred embodiments
FCLSPGPF

SEQ ID NO: 1842 - protein, 15 aa, Artificial Sequence
  Description of Artificial Sequence: Synthetic peptide
  N-term H or Acetyl
  MOD_RES (10)..(10): Ser or Phospho-Ser
  MOD_RES (12)..(12): Modified Cys
  See specification as filed for detailed description of substitutions and preferred embodiments
FDREGFGRQSMCEKR

SEQ ID NO: 1843 - protein, 15 aa, Artificial Sequence
  Description of Artificial Sequence: Synthetic peptide
  N-term H or Acetyl
  MOD_RES (10)..(10): Ser or Phospho-Ser
  MOD_RES (12)..(12): Modified Cys
  See specification as filed for detailed description of substitutions and preferred embodiments
FEREGFGRQSMCEKR

SEQ ID NO: 1844 - protein, 11 aa, Artificial Sequence
  Description of Artificial Sequence: Synthetic peptide
  N-term H or Acetyl
  MOD_RES (5)..(5): Modified Cys
  MOD_RES (7)..(7): Thr or Phospho-Thr
  See specification as filed for detailed description of substitutions and preferred embodiments
FFKKCVTPRTP

SEQ ID NO: 1845 - protein, 11 aa, Artificial Sequence
  Description of Artificial Sequence: Synthetic peptide
  N-term H or Acetyl
  MOD_RES (7)..(7): Thr or Phospho-Thr
  MOD_RES (9)..(9): Modified Cys
  See specification as filed for detailed description of substitutions and preferred embodiments
FFKKIVTPCTP

SEQ ID NO: 1846 - protein, 17 aa, Artificial Sequence
  Description of Artificial Sequence: Synthetic peptide
  N-term H or Acetyl
  MOD_RES (8)..(8): Modified Cys
  MOD_RES (10)..(10): Thr or Phospho-Thr
  See specification as filed for detailed description of substitutions and preferred embodiments
FFKNIVTCRTPPPSQGK

SEQ ID NO: 1847 - protein, 15 aa, Artificial Sequence
  Description of Artificial Sequence: Synthetic peptide
  N-term H or Acetyl
  MOD_RES (10)..(10): Ser or Phospho-Ser
  MOD_RES (12)..(12): Modified Cys
  See specification as filed for detailed description of substitutions and preferred embodiments
FFREGFGRQSMCEKR

SEQ ID NO: 1848 - protein, 15 aa, Artificial Sequence
  Description of Artificial Sequence: Synthetic peptide
  N-term H or Acetyl
  MOD_RES (8)..(8): Ser or Phospho-Ser
  MOD_RES (10)..(10): Modified Cys
  See specification as filed for detailed description of substitutions and preferred embodiments
FGESPPLSPCDMDTQ

SEQ ID NO: 1849 - protein, 15 aa, Artificial Sequence
  Description of Artificial Sequence: Synthetic peptide
  N-term H or Acetyl
  MOD_RES (10)..(10): Ser or Phospho-Ser
  MOD_RES (12)..(12): Modified Cys
  See specification as filed for detailed description of substitutions and preferred embodiments
FGREGFGRQSMCEKR

SEQ ID NO: 1850 - protein, 15 aa, Artificial Sequence
  Description of Artificial Sequence: Synthetic peptide
  N-term H or Acetyl
  MOD_RES (10)..(10): Ser or Phospho-Ser
  MOD_RES (12)..(12): Modified Cys
  See specification as filed for detailed description of substitutions and preferred embodiments
FHREGFGRQSMCEKR

SEQ ID NO: 1851 - protein, 15 aa, Artificial Sequence
  Description of Artificial Sequence: Synthetic peptide
  N-term H or Acetyl
  MOD_RES (10)..(10): Ser or Phospho-Ser
  MOD_RES (12)..(12): Modified Cys
  See specification as filed for detailed description of substitutions and preferred embodiments
FIREGFGRQSMCEKR

SEQ ID NO: 1852 - protein, 15 aa, Artificial Sequence
  Description of Artificial Sequence: Synthetic peptide
  N-term H or Acetyl
  MOD_RES (10)..(10): Ser or Phospho-Ser
  MOD_RES (12)..(12): Modified Cys
  See specification as filed for detailed description of substitutions and preferred embodiments
FKREGFGRQSMCEKR

SEQ ID NO: 1853 - protein, 15 aa, Artificial Sequence
  Description of Artificial Sequence: Synthetic peptide
  N-term H or Acetyl
  MOD_RES (8)..(8): Thr or Phospho-Thr
  MOD_RES (10)..(10): Modified Cys
  See specification as filed for detailed description of substitutions and preferred embodiments
FKRPQRATSCVFAMF

SEQ ID NO: 1854 - protein, 9 aa, Artificial Sequence
  Description of Artificial Sequence: Synthetic peptide
  N-term H or Acetyl
  MOD_RES (6)..(6): Modified Cys
  MOD_RES (8)..(8): Ser or Phospho-Ser
  See specification as filed for detailed description of substitutions and preferred embodiments
FKTEGCDSD

SEQ ID NO: 1855 - protein, 10 aa, Artificial Sequence
  Description of Artificial Sequence: Synthetic peptide
  N-term H or Acetyl
  MOD_RES (8)..(8): Ser or Phospho-Ser
  MOD_RES (10)..(10): Modified Cys
  See specification as filed for detailed description of substitutions and preferred embodiments
FKTEGPDSDC

SEQ ID NO: 1856 - protein, 12 aa, Artificial Sequence
  Description of Artificial Sequence: Synthetic peptide
  N-term H or Acetyl
  MOD_RES (5)..(5): Modified Cys
  MOD_RES (7)..(7): Ser or Phospho-Ser
  See specification as filed for detailed description of substitutions and preferred embodiments
FLLRCSSRRIRR

SEQ ID NO: 1857 - protein, 21 aa, Artificial Sequence
  Description of Artificial Sequence: Synthetic peptide
  N-term H or Acetyl
  MOD_RES (7)..(7): Modified Cys
  MOD_RES (9)..(9): Thr or Phospho-Thr
  See specification as filed for detailed description of substitutions and preferred embodiments
FLPWWRCYTWVVERDVNTKQR

SEQ ID NO: 1858 - protein, 15 aa, Artificial Sequence
  Description of Artificial Sequence: Synthetic peptide
  N-term H or Acetyl
  MOD_RES (10)..(10): Ser or Phospho-Ser
  MOD_RES (12)..(12): Modified Cys
  See specification as filed for detailed description of substitutions and preferred embodiments
FLREGFGRQSMCEKR

SEQ ID NO: 1859 - protein, 15 aa, Artificial Sequence
  Description of Artificial Sequence: Synthetic peptide
  N-term H or Acetyl
  MOD_RES (10)..(10): Ser or Phospho-Ser
  MOD_RES (12)..(12): Modified Cys
  See specification as filed for detailed description of substitutions and preferred embodiments
FNREGFGRQSMCEKR

SEQ ID NO: 1860 - protein, 12 aa, Artificial Sequence
  Description of Artificial Sequence: Synthetic peptide
  N-term H or Acetyl
  MOD_RES (3)..(3): Modified Cys
  MOD_RES (5)..(5): Ser or Phospho-Ser
  See specification as filed for detailed description of substitutions and preferred embodiments
FPCFSYSASGTA

SEQ ID NO: 1861 - protein, 15 aa, Artificial Sequence
  Description of Artificial Sequence: Synthetic peptide
  N-term H or Acetyl
  MOD_RES (10)..(10): Ser or Phospho-Ser
  MOD_RES (12)..(12): Modified Cys
  See specification as filed for detailed description of substitutions and preferred embodiments
FPREGFGRQSMCEKR

SEQ ID NO: 1862 - protein, 17 aa, Artificial Sequence
  Description of Artificial Sequence: Synthetic peptide
  N-term H or Acetyl
  MOD_RES (10)..(10): Thr or Phospho-Thr
  MOD_RES (12)..(12): Modified Cys
  See specification as filed for detailed description of substitutions and preferred embodiments
FPRGSSSRSTFCGEGLR

SEQ ID NO: 1863 - protein, 15 aa, Artificial Sequence
  Description of Artificial Sequence: Synthetic peptide
  N-term H or Acetyl
  MOD_RES (3)..(3): Leu or Nle (i.e. isomer of Leucine)
  MOD_RES (10)..(10): Ser or Phospho-Ser
  MOD_RES (12)..(12): Modified Cys
  See specification as filed for detailed description of substitutions and preferred embodiments
FQLEGFGRQSMCEKR

SEQ ID NO: 1864 - protein, 15 aa, Artificial Sequence
  Description of Artificial Sequence: Synthetic peptide
  N-term H or Acetyl
  MOD_RES (10)..(10): Ser or Phospho-Ser
  MOD_RES (12)..(12): Modified Cys
  See specification as filed for detailed description of substitutions and preferred embodiments
FQAEGFGRQSMCEKR

SEQ ID NO: 1865 - protein, 15 aa, Artificial Sequence
  Description of Artificial Sequence: Synthetic peptide
  N-term H or Acetyl
  MOD_RES (10)..(10): Ser or Phospho-Ser
  MOD_RES (12)..(12): Modified Cys
  See specification as filed for detailed description of substitutions and preferred embodiments
FQDEGFGRQSMCEKR

SEQ ID NO: 1866 - protein, 15 aa, Artificial Sequence
  Description of Artificial Sequence: Synthetic peptide
  N-term H or Acetyl
  MOD_RES (10)..(10): Ser or Phospho-Ser
  MOD_RES (12)..(12): Modified Cys
  See specification as filed for detailed description of substitutions and preferred embodiments
FQEEGFGRQSMCEKR

SEQ ID NO: 1867 - protein, 15 aa, Artificial Sequence
  Description of Artificial Sequence: Synthetic peptide
  N-term H or Acetyl
  MOD_RES (10)..(10): Ser or Phospho-Ser
  MOD_RES (12)..(12): Modified Cys
  See specification as filed for detailed description of substitutions and preferred embodiments
FQFEGFGRQSMCEKR

SEQ ID NO: 1868 - protein, 15 aa, Artificial Sequence
  Description of Artificial Sequence: Synthetic peptide
  N-term H or Acetyl
  MOD_RES (10)..(10): Ser or Phospho-Ser
  MOD_RES (12)..(12): Modified Cys
  See specification as filed for detailed description of substitutions and preferred embodiments
FQGEGFGRQSMCEKR

SEQ ID NO: 1869 - protein, 15 aa, Artificial Sequence
  Description of Artificial Sequence: Synthetic peptide
  N-term H or Acetyl
  MOD_RES (10)..(10): Ser or Phospho-Ser
  MOD_RES (12)..(12): Modified Cys
  See specification as filed for detailed description of substitutions and preferred embodiments
FQHEGFGRQSMCEKR

SEQ ID NO: 1870 - protein, 15 aa, Artificial Sequence
  Description of Artificial Sequence: Synthetic peptide
  N-term H or Acetyl
  MOD_RES (10)..(10): Ser or Phospho-Ser
  MOD_RES (12)..(12): Modified Cys
  See specification as filed for detailed description of substitutions and preferred embodiments
FQIEGFGRQSMCEKR

SEQ ID NO: 1871 - protein, 15 aa, Artificial Sequence
  Description of Artificial Sequence: Synthetic peptide
  N-term H or Acetyl
  MOD_RES (10)..(10): Ser or Phospho-Ser
  MOD_RES (12)..(12): Modified Cys
  See specification as filed for detailed description of substitutions and preferred embodiments
FQKEGFGRQSMCEKR

SEQ ID NO: 1872 - protein, 15 aa, Artificial Sequence
  Description of Artificial Sequence: Synthetic peptide
  N-term H or Acetyl
  MOD_RES (10)..(10): Ser or Phospho-Ser
  MOD_RES (12)..(12): Modified Cys
  See specification as filed for detailed description of substitutions and preferred embodiments
FQLEGFGRQSMCEKR

SEQ ID NO: 1873 - protein, 15 aa, Artificial Sequence
  Description of Artificial Sequence: Synthetic peptide
  N-term H or Acetyl
  MOD_RES (10)..(10): Ser or Phospho-Ser
  MOD_RES (12)..(12): Modified Cys
  See specification as filed for detailed description of substitutions and preferred embodiments
FQNEGFGRQSMCEKR

SEQ ID NO: 1874 - protein, 15 aa, Artificial Sequence
  Description of Artificial Sequence: Synthetic peptide
  N-term H or Acetyl
  MOD_RES (10)..(10): Ser or Phospho-Ser
  MOD_RES (12)..(12): Modified Cys
  See specification as filed for detailed description of substitutions and preferred embodiments
FQPEGFGRQSMCEKR

SEQ ID NO: 1875 - protein, 15 aa, Artificial Sequence
  Description of Artificial Sequence: Synthetic peptide
  N-term H or Acetyl
  MOD_RES (10)..(10): Ser or Phospho-Ser
  MOD_RES (12)..(12): Modified Cys
  See specification as filed for detailed description of substitutions and preferred embodiments
FQQEGFGRQSMCEKR

SEQ ID NO: 1876 - protein, 15 aa, Artificial Sequence
  Description of Artificial Sequence: Synthetic peptide
  N-term H or Acetyl
  MOD_RES (4)..(4): Leu or Nle (i.e. isomer of Leucine)
  MOD_RES (10)..(10): Ser or Phospho-Ser
  MOD_RES (12)..(12): Modified Cys
  See specification as filed for detailed description of substitutions and preferred embodiments
FQRLGFGRQSMCEKR

SEQ ID NO: 1877 - protein, 15 aa, Artificial Sequence
  Description of Artificial Sequence: Synthetic peptide
  N-term H or Acetyl
  MOD_RES (10)..(10): Ser or Phospho-Ser
  MOD_RES (12)..(12): Modified Cys
  See specification as filed for detailed description of substitutions and preferred embodiments
FQRAGFGRQSMCEKR

SEQ ID NO: 1878 - protein, 15 aa, Artificial Sequence
  Description of Artificial Sequence: Synthetic peptide
  N-term H or Acetyl
  MOD_RES (10)..(10): Ser or Phospho-Ser
  MOD_RES (12)..(12): Modified Cys
  See specification as filed for detailed description of substitutions and preferred embodiments
FQRDGFGRQSMCEKR

SEQ ID NO: 1879 - protein, 15 aa, Artificial Sequence
  Description of Artificial Sequence: Synthetic peptide
  N-term H or Acetyl
  MOD_RES (5)..(5): Leu or Nle (i.e. isomer of Leucine)
  MOD_RES (10)..(10): Ser or Phospho-Ser
  MOD_RES (12)..(12): Modified Cys
  See specification as filed for detailed description of substitutions and preferred embodiments
FQRELFGRQSMCEKR

SEQ ID NO: 1880 - protein, 15 aa, Artificial Sequence
  Description of Artificial Sequence: Synthetic peptide
  N-term H or Acetyl
  MOD_RES (10)..(10): Ser or Phospho-Ser
  MOD_RES (12)..(12): Modified Cys
  See specification as filed for detailed description of substitutions and preferred embodiments
FQREAFGRQSMCEKR

SEQ ID NO: 1881 - protein, 15 aa, Artificial Sequence
  Description of Artificial Sequence: Synthetic peptide
  N-term H or Acetyl
  MOD_RES (10)..(10): Ser or Phospho-Ser
  MOD_RES (12)..(12): Modified Cys
  See specification as filed for detailed description of substitutions and preferred embodiments
FQREDFGRQSMCEKR

SEQ ID NO: 1882 - protein, 15 aa, Artificial Sequence
  Description of Artificial Sequence: Synthetic peptide
  N-term H or Acetyl
  MOD_RES (10)..(10): Ser or Phospho-Ser
  MOD_RES (12)..(12): Modified Cys
  See specification as filed for detailed description of substitutions and preferred embodiments
FQREEFGRQSMCEKR

SEQ ID NO: 1883 - protein, 15 aa, Artificial Sequence
  Description of Artificial Sequence: Synthetic peptide
  N-term H or Acetyl
  MOD_RES (10)..(10): Ser or Phospho-Ser
  MOD_RES (12)..(12): Modified Cys
  See specification as filed for detailed description of substitutions and preferred embodiments
FQREFFGRQSMCEKR

SEQ ID NO: 1884 - protein, 15 aa, Artificial Sequence
  Description of Artificial Sequence: Synthetic peptide
  N-term H or Acetyl
  MOD_RES (6)..(6): Leu or Nle (i.e. isomer of Leucine)
  MOD_RES (10)..(10): Ser or Phospho-Ser
  MOD_RES (12)..(12): Modified Cys
  See specification as filed for detailed description of substitutions and preferred embodiments
FQREGLGRQSMCEKR

SEQ ID NO: 1885 - protein, 15 aa, Artificial Sequence
  Description of Artificial Sequence: Synthetic peptide
  N-term H or Acetyl
  MOD_RES (10)..(10): Ser or Phospho-Ser
  MOD_RES (12)..(12): Modified Cys
  See specification as filed for detailed description of substitutions and preferred embodiments
FQREGAGRQSMCEKR

SEQ ID NO: 1886 - protein, 15 aa, Artificial Sequence
  Description of Artificial Sequence: Synthetic peptide
  N-term H or Acetyl
  MOD_RES (10)..(10): Ser or Phospho-Ser
  MOD_RES (12)..(12): Modified Cys
  See specification as filed for detailed description of substitutions and preferred embodiments
FQREGDGRQSMCEKR

SEQ ID NO: 1887 - protein, 15 aa, Artificial Sequence
  Description of Artificial Sequence: Synthetic peptide
  N-term H or Acetyl
  MOD_RES (10)..(10): Ser or Phospho-Ser
  MOD_RES (12)..(12): Modified Cys
  See specification as filed for detailed description of substitutions and preferred embodiments
FQREGEGRQSMCEKR

SEQ ID NO: 1888 - protein, 15 aa, Artificial Sequence
  Description of Artificial Sequence: Synthetic peptide
  N-term H or Acetyl
  MOD_RES (7)..(7): Leu or Nle (i.e. isomer of Leucine)
  MOD_RES (10)..(10): Ser or Phospho-Ser
  MOD_RES (12)..(12): Modified Cys
  See specification as filed for detailed description of substitutions and preferred embodiments
FQREGFLRQSMCEKR

SEQ ID NO: 1889 - protein, 15 aa, Artificial Sequence
  Description of Artificial Sequence: Synthetic peptide
  N-term H or Acetyl
  MOD_RES (10)..(10): Ser or Phospho-Ser
  MOD_RES (12)..(12): Modified Cys
  See specification as filed for detailed description of substitutions and preferred embodiments
FQREGFARQSMCEKR

SEQ ID NO: 1890 - protein, 15 aa, Artificial Sequence
  Description of Artificial Sequence: Synthetic peptide
  N-term H or Acetyl
  MOD_RES (10)..(10): Ser or Phospho-Ser
  MOD_RES (12)..(12): Modified Cys
  See specification as filed for detailed description of substitutions and preferred embodiments
FQREGFDRQSMCEKR

SEQ ID NO: 1891 - protein, 15 aa, Artificial Sequence
  Description of Artificial Sequence: Synthetic peptide
  N-term H or Acetyl
  MOD_RES (10)..(10): Ser or Phospho-Ser
  MOD_RES (12)..(12): Modified Cys
  See specification as filed for detailed description of substitutions and preferred embodiments
FQREGFERQSMCEKR

SEQ ID NO: 1892 - protein, 15 aa, Artificial Sequence
  Description of Artificial Sequence: Synthetic peptide
  N-term H or Acetyl
  MOD_RES (10)..(10): Ser or Phospho-Ser
  MOD_RES (12)..(12): Modified Cys
  See specification as filed for detailed description of substitutions and preferred embodiments
FQREGFFRQSMCEKR

SEQ ID NO: 1893 - protein, 15 aa, Artificial Sequence
  Description of Artificial Sequence: Synthetic peptide
  N-term H or Acetyl
  MOD_RES (8)..(8): Leu or Nle (i.e. isomer of Leucine)
  MOD_RES (10)..(10): Ser or Phospho-Ser
  MOD_RES (12)..(12): Modified Cys
  See specification as filed for detailed description of substitutions and preferred embodiments
FQREGFGLQSMCEKR

SEQ ID NO: 1894 - protein, 15 aa, Artificial Sequence
  Description of Artificial Sequence: Synthetic peptide
  N-term H or Acetyl
  MOD_RES (10)..(10): Ser or Phospho-Ser
  MOD_RES (12)..(12): Modified Cys
  See specification as filed for detailed description of substitutions and preferred embodiments
FQREGFGAQSMCEKR

SEQ ID NO: 1895 - protein, 15 aa, Artificial Sequence
  Description of Artificial Sequence: Synthetic peptide
  N-term H or Acetyl
  MOD_RES (10)..(10): Ser or Phospho-Ser
  MOD_RES (12)..(12): Modified Cys
  See specification as filed for detailed description of substitutions and preferred embodiments
FQREGFGDQSMCEKR

SEQ ID NO: 1896 - protein, 15 aa, Artificial Sequence
  Description of Artificial Sequence: Synthetic peptide
  N-term H or Acetyl
  MOD_RES (10)..(10): Ser or Phospho-Ser
  MOD_RES (12)..(12): Modified Cys
  See specification as filed for detailed description of substitutions and preferred embodiments
FQREGFGEQSMCEKR

SEQ ID NO: 1897 - protein, 15 aa, Artificial Sequence
  Description of Artificial Sequence: Synthetic peptide
  N-term H or Acetyl
  MOD_RES (10)..(10): Ser or Phospho-Ser
  MOD_RES (12)..(12): Modified Cys
  See specification as filed for detailed description of substitutions and preferred embodiments
FQREGFGFQSMCEKR

SEQ ID NO: 1898 - protein, 15 aa, Artificial Sequence
  Description of Artificial Sequence: Synthetic peptide
  N-term H or Acetyl
  MOD_RES (10)..(10): Ser or Phospho-Ser
  MOD_RES (12)..(12): Modified Cys
  See specification as filed for detailed description of substitutions and preferred embodiments
FQREGFGGQSMCEKR

SEQ ID NO: 1899 - protein, 15 aa, Artificial Sequence
  Description of Artificial Sequence: Synthetic peptide
  N-term H or Acetyl
  MOD_RES (10)..(10): Ser or Phospho-Ser
  MOD_RES (12)..(12): Modified Cys
  See specification as filed for detailed description of substitutions and preferred embodiments
FQREGFGHQSMCEKR

SEQ ID NO: 1900 - protein, 15 aa, Artificial Sequence
  Description of Artificial Sequence: Synthetic peptide
  N-term H or Acetyl
  MOD_RES (10)..(10): Ser or Phospho-Ser
  MOD_RES (12)..(12): Modified Cys
  See specification as filed for detailed description of substitutions and preferred embodiments
FQREGFGIQSMCEKR

SEQ ID NO: 1901 - protein, 15 aa, Artificial Sequence
  Description of Artificial Sequence: Synthetic peptide
  N-term H or Acetyl
  MOD_RES (10)..(10): Ser or Phospho-Ser
  MOD_RES (12)..(12): Modified Cys
  See specification as filed for detailed description of substitutions and preferred embodiments
FQREGFGKQSMCEKR

SEQ ID NO: 1902 - protein, 15 aa, Artificial Sequence
  Description of Artificial Sequence: Synthetic peptide
  N-term H or Acetyl
  MOD_RES (10)..(10): Ser or Phospho-Ser
  MOD_RES (12)..(12): Modified Cys
  See specification as filed for detailed description of substitutions and preferred embodiments
FQREGFGLQSMCEKR

SEQ ID NO: 1903 - protein, 15 aa, Artificial Sequence
  Description of Artificial Sequence: Synthetic peptide
  N-term H or Acetyl
  MOD_RES (10)..(10): Ser or Phospho-Ser
  MOD_RES (12)..(12): Modified Cys
  See specification as filed for detailed description of substitutions and preferred embodiments
FQREGFGNQSMCEKR

SEQ ID NO: 1904 - protein, 15 aa, Artificial Sequence
  Description of Artificial Sequence: Synthetic peptide
  N-term H or Acetyl
  MOD_RES (10)..(10): Ser or Phospho-Ser
  MOD_RES (12)..(12): Modified Cys
  See specification as filed for detailed description of substitutions and preferred embodiments
FQREGFGPQSMCEKR

SEQ ID NO: 1905 - protein, 15 aa, Artificial Sequence
  Description of Artificial Sequence: Synthetic peptide
  N-term H or Acetyl
  MOD_RES (10)..(10): Ser or Phospho-Ser
  MOD_RES (12)..(12): Modified Cys
  See specification as filed for detailed description of substitutions and preferred embodiments
FQREGFGQQSMCEKR

SEQ ID NO: 1906 - protein, 15 aa, Artificial Sequence
  Description of Artificial Sequence: Synthetic peptide
  N-term H or Acetyl
  MOD_RES (9)..(9): Leu or Nle (i.e. isomer of Leucine)
  MOD_RES (10)..(10): Ser or Phospho-Ser
  MOD_RES (12)..(12): Modified Cys
  See specification as filed for detailed description of substitutions and preferred embodiments
FQREGFGRLSMCEKR

SEQ ID NO: 1907 - protein, 15 aa, Artificial Sequence
  Description of Artificial Sequence: Synthetic peptide
  N-term H or Acetyl
  MOD_RES (10)..(10): Ser or Phospho-Ser
  MOD_RES (12)..(12): Modified Cys
  See specification as filed for detailed description of substitutions and preferred embodiments
FQREGFGRASMCEKR

SEQ ID NO: 1908 - protein, 15 aa, Artificial Sequence
  Description of Artificial Sequence: Synthetic peptide
  N-term H or Acetyl
  MOD_RES (10)..(10): Ser or Phospho-Ser
  MOD_RES (12)..(12): Modified Cys
  See specification as filed for detailed description of substitutions and preferred embodiments
FQREGFGRDSMCEKR

SEQ ID NO: 1909 - protein, 15 aa, Artificial Sequence
  Description of Artificial Sequence: Synthetic peptide
  N-term H or Acetyl
  MOD_RES (10)..(10): Ser or Phospho-Ser
  MOD_RES (12)..(12): Modified Cys
  See specification as filed for detailed description of substitutions and preferred embodiments
FQREGFGRESMCEKR

SEQ ID NO: 1910 - protein, 15 aa, Artificial Sequence
  Description of Artificial Sequence: Synthetic peptide
  N-term H or Acetyl
  MOD_RES (10)..(10): Ser or Phospho-Ser
  MOD_RES (12)..(12): Modified Cys
  See specification as filed for detailed description of substitutions and preferred embodiments
FQREGFGRFSMCEKR

SEQ ID NO: 1911 - protein, 15 aa, Artificial Sequence
  Description of Artificial Sequence: Synthetic peptide
  N-term H or Acetyl
  MOD_RES (10)..(10): Ser or Phospho-Ser
  MOD_RES (12)..(12): Modified Cys
  See specification as filed for detailed description of substitutions and preferred embodiments
FQREGFGRGSMCEKR

SEQ ID NO: 1912 - protein, 15 aa, Artificial Sequence
  Description of Artificial Sequence: Synthetic peptide
  N-term H or Acetyl
  MOD_RES (10)..(10): Ser or Phospho-Ser
  MOD_RES (12)..(12): Modified Cys
  See specification as filed for detailed description of substitutions and preferred embodiments
FQREGFGRHSMCEKR

SEQ ID NO: 1913 - protein, 15 aa, Artificial Sequence
  Description of Artificial Sequence: Synthetic peptide
  N-term H or Acetyl
  MOD_RES (10)..(10): Ser or Phospho-Ser
  MOD_RES (12)..(12): Modified Cys
  See specification as filed for detailed description of substitutions and preferred embodiments
FQREGFGRISMCEKR

SEQ ID NO: 1914 - protein, 15 aa, Artificial Sequence
  Description of Artificial Sequence: Synthetic peptide
  N-term H or Acetyl
  MOD_RES (10)..(10): Ser or Phospho-Ser
  MOD_RES (12)..(12): Modified Cys
  See specification as filed for detailed description of substitutions and preferred embodiments
FQREGFGRKSMCEKR

SEQ ID NO: 1915 - protein, 15 aa, Artificial Sequence
  Description of Artificial Sequence: Synthetic peptide
  N-term H or Acetyl
  MOD_RES (10)..(10): Ser or Phospho-Ser
  MOD_RES (12)..(12): Modified Cys
  See specification as filed for detailed description of substitutions and preferred embodiments
FQREGFGRLSMCEKR

SEQ ID NO: 1916 - protein, 15 aa, Artificial Sequence
  Description of Artificial Sequence: Synthetic peptide
  N-term H or Acetyl
  MOD_RES (10)..(10): Ser or Phospho-Ser
  MOD_RES (12)..(12): Modified Cys
  See specification as filed for detailed description of substitutions and preferred embodiments
FQREGFGRNSMCEKR

SEQ ID NO: 1917 - protein, 15 aa, Artificial Sequence
  Description of Artificial Sequence: Synthetic peptide
  N-term H or Acetyl
  MOD_RES (10)..(10): Ser or Phospho-Ser
  MOD_RES (12)..(12): Modified Cys
  See specification as filed for detailed description of substitutions and preferred embodiments
FQREGFGRPSMCEKR

SEQ ID NO: 1918 - protein, 15 aa, Artificial Sequence
  Description of Artificial Sequence: Synthetic peptide
  N-term H or Acetyl
  MOD_RES (10)..(10): Ser or Phospho-Ser
  MOD_RES (11)..(11): Leu or Nle (i.e. isomer of Leucine)
  MOD_RES (12)..(12): Modified Cys
  See specification as filed for detailed description of substitutions and preferred embodiments
FQREGFGRQSLCEKR

SEQ ID NO: 1919 - protein, 15 aa, Artificial Sequence
  Description of Artificial Sequence: Synthetic peptide
  N-term H or Acetyl
  MOD_RES (10)..(10): Ser or Phospho-Ser
  MOD_RES (12)..(12): Modified Cys
  See specification as filed for detailed description of substitutions and preferred embodiments
FQREGFGRQSACEKR

SEQ ID NO: 1920 - protein, 15 aa, Artificial Sequence
  Description of Artificial Sequence: Synthetic peptide
  N-term H or Acetyl
  MOD_RES (10)..(10): Ser or Phospho-Ser
  MOD_RES (12)..(12): Modified Cys
  See specification as filed for detailed description of substitutions and preferred embodiments
FQREGFGRQSDCEKR

SEQ ID NO: 1921 - protein, 15 aa, Artificial Sequence
  Description of Artificial Sequence: Synthetic peptide
  N-term H or Acetyl
  MOD_RES (10)..(10): Ser or Phospho-Ser
  MOD_RES (12)..(12): Modified Cys
  See specification as filed for detailed description of substitutions and preferred embodiments
FQREGFGRQSECEKR

SEQ ID NO: 1922 - protein, 15 aa, Artificial Sequence
  Description of Artificial Sequence: Synthetic peptide
  N-term H or Acetyl
  MOD_RES (10)..(10): Ser or Phospho-Ser
  MOD_RES (12)..(12): Modified Cys
  See specification as filed for detailed description of substitutions and preferred embodiments
FQREGFGRQSFCEKR

SEQ ID NO: 1923 - protein, 15 aa, Artificial Sequence
  Description of Artificial Sequence: Synthetic peptide
  N-term H or Acetyl
  MOD_RES (10)..(10): Ser or Phospho-Ser
  MOD_RES (12)..(12): Modified Cys
  See specification as filed for detailed description of substitutions and preferred embodiments
FQREGFGRQSGCEKR

SEQ ID NO: 1924 - protein, 15 aa, Artificial Sequence
  Description of Artificial Sequence: Synthetic peptide
  N-term H or Acetyl
  MOD_RES (10)..(10): Ser or Phospho-Ser
  MOD_RES (12)..(12): Modified Cys
  See specification as filed for detailed description of substitutions and preferred embodiments
FQREGFGRQSHCEKR

SEQ ID NO: 1925 - protein, 15 aa, Artificial Sequence
  Description of Artificial Sequence: Synthetic peptide
  N-term H or Acetyl
  MOD_RES (10)..(10): Ser or Phospho-Ser
  MOD_RES (12)..(12): Modified Cys
  See specification as filed for detailed description of substitutions and preferred embodiments
FQREGFGRQSICEKR

SEQ ID NO: 1926 - protein, 15 aa, Artificial Sequence
  Description of Artificial Sequence: Synthetic peptide
  N-term H or Acetyl
  MOD_RES (10)..(10): Ser or Phospho-Ser
  MOD_RES (12)..(12): Modified Cys
  See specification as filed for detailed description of substitutions and preferred embodiments
FQREGFGRQSKCEKR

SEQ ID NO: 1927 - protein, 15 aa, Artificial Sequence
  Description of Artificial Sequence: Synthetic peptide
  N-term H or Acetyl
  MOD_RES (10)..(10): Ser or Phospho-Ser
  MOD_RES (12)..(12): Modified Cys
  See specification as filed for detailed description of substitutions and preferred embodiments
FQREGFGRQSLCEKR

SEQ ID NO: 1928 - protein, 15 aa, Artificial Sequence
  Description of Artificial Sequence: Synthetic peptide
  N-term H or Acetyl
  MOD_RES (10)..(10): Ser or Phospho-Ser
  MOD_RES (12)..(12): Modified Cys
  MOD_RES (13)..(13): Leu or Nle (i.e. isomer of Leucine)
  See specification as filed for detailed description of substitutions and preferred embodiments
FQREGFGRQSMCLKR

SEQ ID NO: 1929 - protein, 15 aa, Artificial Sequence
  Description of Artificial Sequence: Synthetic peptide
  N-term H or Acetyl
  MOD_RES (10)..(10): Ser or Phospho-Ser
  MOD_RES (12)..(12): Modified Cys
  See specification as filed for detailed description of substitutions and preferred embodiments
FQREGFGRQSMCAKR

SEQ ID NO: 1930 - protein, 15 aa, Artificial Sequence
  Description of Artificial Sequence: Synthetic peptide
  N-term H or Acetyl
  MOD_RES (10)..(10): Ser or Phospho-Ser
  MOD_RES (12)..(12): Modified Cys
  See specification as filed for detailed description of substitutions and preferred embodiments
FQREGFGRQSMCDKR

SEQ ID NO: 1931 - protein, 15 aa, Artificial Sequence
  Description of Artificial Sequence: Synthetic peptide
  N-term H or Acetyl
  MOD_RES (10)..(10): Ser or Phospho-Ser
  MOD_RES (12)..(12): Modified Cys
  MOD_RES (14)..(14): Leu or Nle (i.e. isomer of Leucine)
  See specification as filed for detailed description of substitutions and preferred embodiments
FQREGFGRQSMCELR

SEQ ID NO: 1932 - protein, 17 aa, Artificial Sequence
  Description of Artificial Sequence: Synthetic peptide
  N-term H or Acetyl
  MOD_RES (10)..(10): Ser or Phospho-Ser
  MOD_RES (12)..(12): Modified Cys
  See specification as filed for detailed description of substitutions and preferred embodiments
FQREGFGRQSMCEAATK

SEQ ID NO: 1933 - protein, 15 aa, Artificial Sequence
  Description of Artificial Sequence: Synthetic peptide
  N-term H or Acetyl
  MOD_RES (10)..(10): Ser or Phospho-Ser
  MOD_RES (12)..(12): Modified Cys
  See specification as filed for detailed description of substitutions and preferred embodiments
FQREGFGRQSMCEAR

SEQ ID NO: 1934 - protein, 15 aa, Artificial Sequence
  Description of Artificial Sequence: Synthetic peptide
  N-term H or Acetyl
  MOD_RES (10)..(10): Ser or Phospho-Ser
  MOD_RES (12)..(12): Modified Cys
  See specification as filed for detailed description of substitutions and preferred embodiments
FQREGFGRQSMCEDR

SEQ ID NO: 1935 - protein, 15 aa, Artificial Sequence
  Description of Artificial Sequence: Synthetic peptide
  N-term H or Acetyl
  MOD_RES (10)..(10): Ser or Phospho-Ser
  MOD_RES (12)..(12): Modified Cys
  See specification as filed for detailed description of substitutions and preferred embodiments
FQREGFGRQSMCEER

SEQ ID NO: 1936 - protein, 15 aa, Artificial Sequence
  Description of Artificial Sequence: Synthetic peptide
  N-term H or Acetyl
  MOD_RES (10)..(10): Ser or Phospho-Ser
  MOD_RES (12)..(12): Modified Cys
  See specification as filed for detailed description of substitutions and preferred embodiments
FQREGFGRQSMCEFR

SEQ ID NO: 1937 - protein, 15 aa, Artificial Sequence
  Description of Artificial Sequence: Synthetic peptide
  N-term H or Acetyl
  MOD_RES (10)..(10): Ser or Phospho-Ser
  MOD_RES (12)..(12): Modified Cys
  See specification as filed for detailed description of substitutions and preferred embodiments
FQREGFGRQSMCEGR

SEQ ID NO: 1938 - protein, 15 aa, Artificial Sequence
  Description of Artificial Sequence: Synthetic peptide
  N-term H or Acetyl
  MOD_RES (10)..(10): Ser or Phospho-Ser
  MOD_RES (12)..(12): Modified Cys
  See specification as filed for detailed description of substitutions and preferred embodiments
FQREGFGRQSMCEHR

SEQ ID NO: 1939 - protein, 15 aa, Artificial Sequence
  Description of Artificial Sequence: Synthetic peptide
  N-term H or Acetyl
  MOD_RES (10)..(10): Ser or Phospho-Ser
  MOD_RES (12)..(12): Modified Cys
  See specification as filed for detailed description of substitutions and preferred embodiments
FQREGFGRQSMCEIR

SEQ ID NO: 1940 - protein, 15 aa, Artificial Sequence
  Description of Artificial Sequence: Synthetic peptide
  N-term H or Acetyl
  MOD_RES (10)..(10): Ser or Phospho-Ser
  MOD_RES (12)..(12): Modified Cys
  MOD_RES (15)..(15): Leu or Nle (i.e. isomer of Leucine)
  See specification as filed for detailed description of substitutions and preferred embodiments
FQREGFGRQSMCEKL

SEQ ID NO: 1941 - protein, 15 aa, Artificial Sequence
  Description of Artificial Sequence: Synthetic peptide
  N-term H or Acetyl
  MOD_RES (10)..(10): Ser or Phospho-Ser
  MOD_RES (12)..(12): Modified Cys
  See specification as filed for detailed description of substitutions and preferred embodiments
FQREGFGRQSMCEKA

SEQ ID NO: 1942 - protein, 15 aa, Artificial Sequence
  Description of Artificial Sequence: Synthetic peptide
  N-term H or Acetyl
  MOD_RES (10)..(10): Ser or Phospho-Ser
  MOD_RES (12)..(12): Modified Cys
  See specification as filed for detailed description of substitutions and preferred embodiments
FQREGFGRQSMCEKD

SEQ ID NO: 1943 - protein, 15 aa, Artificial Sequence
  Description of Artificial Sequence: Synthetic peptide
  N-term H or Acetyl
  MOD_RES (10)..(10): Ser or Phospho-Ser
  MOD_RES (12)..(12): Modified Cys
  See specification as filed for detailed description of substitutions and preferred embodiments
FQREGFGRQSMCEKE

SEQ ID NO: 1944 - protein, 15 aa, Artificial Sequence
  Description of Artificial Sequence: Synthetic peptide
  N-term H or Acetyl
  MOD_RES (10)..(10): Ser or Phospho-Ser
  MOD_RES (12)..(12): Modified Cys
  See specification as filed for detailed description of substitutions and preferred embodiments
FQREGFGRQSMCEKF

SEQ ID NO: 1945 - protein, 15 aa, Artificial Sequence
  Description of Artificial Sequence: Synthetic peptide
  N-term H or Acetyl
  MOD_RES (10)..(10): Ser or Phospho-Ser
  MOD_RES (12)..(12): Modified Cys
  See specification as filed for detailed description of substitutions and preferred embodiments
FQREGFGRQSMCEKG

SEQ ID NO: 1946 - protein, 15 aa, Artificial Sequence
  Description of Artificial Sequence: Synthetic peptide
  N-term H or Acetyl
  MOD_RES (10)..(10): Ser or Phospho-Ser
  MOD_RES (12)..(12): Modified Cys
  See specification as filed for detailed description of substitutions and preferred embodiments
FQREGFGRQSMCEKH

SEQ ID NO: 1947 - protein, 15 aa, Artificial Sequence
  Description of Artificial Sequence: Synthetic peptide
  N-term H or Acetyl
  MOD_RES (10)..(10): Ser or Phospho-Ser
  MOD_RES (12)..(12): Modified Cys
  See specification as filed for detailed description of substitutions and preferred embodiments
FQREGFGRQSMCEKI

SEQ ID NO: 1948 - protein, 15 aa, Artificial Sequence
  Description of Artificial Sequence: Synthetic peptide
  N-term H or Acetyl
  MOD_RES (10)..(10): Ser or Phospho-Ser
  MOD_RES (12)..(12): Modified Cys
  See specification as filed for detailed description of substitutions and preferred embodiments
FQREGFGRQSMCEKK

SEQ ID NO: 1949 - protein, 15 aa, Artificial Sequence
  Description of Artificial Sequence: Synthetic peptide
  N-term H or Acetyl
  MOD_RES (10)..(10): Ser or Phospho-Ser
  MOD_RES (12)..(12): Modified Cys
  See specification as filed for detailed description of substitutions and preferred embodiments
FQREGFGRQSMCEKL

SEQ ID NO: 1950 - protein, 15 aa, Artificial Sequence
  Description of Artificial Sequence: Synthetic peptide
  N-term H or Acetyl
  MOD_RES (10)..(10): Ser or Phospho-Ser
  MOD_RES (12)..(12): Modified Cys
  See specification as filed for detailed description of substitutions and preferred embodiments
FQREGFGRQSMCEKN

SEQ ID NO: 1951 - protein, 15 aa, Artificial Sequence
  Description of Artificial Sequence: Synthetic peptide
  N-term H or Acetyl
  MOD_RES (10)..(10): Ser or Phospho-Ser
  MOD_RES (12)..(12): Modified Cys
  See specification as filed for detailed description of substitutions and preferred embodiments
FQREGFGRQSMCEKP

SEQ ID NO: 1952 - protein, 15 aa, Artificial Sequence
  Description of Artificial Sequence: Synthetic peptide
  N-term H or Acetyl
  MOD_RES (10)..(10): Ser or Phospho-Ser
  MOD_RES (12)..(12): Modified Cys
  See specification as filed for detailed description of substitutions and preferred embodiments
FQREGFGRQSMCEKQ

SEQ ID NO: 1953 - protein, 17 aa, Artificial Sequence
  Description of Artificial Sequence: Synthetic peptide
  N-term H or Acetyl
  MOD_RES (10)..(10): Ser or Phospho-Ser
  MOD_RES (12)..(12): Modified Cys
  MOD_RES (16)..(16): Thr or Phospho-Thr
  See specification as filed for detailed description of substitutions and preferred embodiments
FQREGFGRQSMCEKRTK

SEQ ID NO: 1954 - protein, 17 aa, Artificial Sequence
  Description of Artificial Sequence: Synthetic peptide
  N-term H or Acetyl
  MOD_RES (10)..(10): Ser or Phospho-Ser
  MOD_RES (12)..(12): Modified Cys
  See specification as filed for detailed description of substitutions and preferred embodiments
FQREGFGRQSMCEKRTK

SEQ ID NO: 1955 - protein, 15 aa, Artificial Sequence
  Description of Artificial Sequence: Synthetic peptide
  N-term H or Acetyl
  MOD_RES (10)..(10): Ser or Phospho-Ser
  MOD_RES (12)..(12): Modified Cys
  See specification as filed for detailed description of substitutions and preferred embodiments
FQREGFGRQSMCEKV

SEQ ID NO: 1956 - protein, 15 aa, Artificial Sequence
  Description of Artificial Sequence: Synthetic peptide
  N-term H or Acetyl
  MOD_RES (10)..(10): Ser or Phospho-Ser
  MOD_RES (12)..(12): Modified Cys
  See specification as filed for detailed description of substitutions and preferred embodiments
FQREGFGRQSMCEKW

SEQ ID NO: 1957 - protein, 15 aa, Artificial Sequence
  Description of Artificial Sequence: Synthetic peptide
  N-term H or Acetyl
  MOD_RES (10)..(10): Ser or Phospho-Ser
  MOD_RES (12)..(12): Modified Cys
  See specification as filed for detailed description of substitutions and preferred embodiments
FQREGFGRQSMCELR

SEQ ID NO: 1958 - protein, 15 aa, Artificial Sequence
  Description of Artificial Sequence: Synthetic peptide
  N-term H or Acetyl
  MOD_RES (10)..(10): Ser or Phospho-Ser
  MOD_RES (12)..(12): Modified Cys
  See specification as filed for detailed description of substitutions and preferred embodiments
FQREGFGRQSMCENR

SEQ ID NO: 1959 - protein, 15 aa, Artificial Sequence
  Description of Artificial Sequence: Synthetic peptide
  N-term H or Acetyl
  MOD_RES (10)..(10): Ser or Phospho-Ser
  MOD_RES (12)..(12): Modified Cys
  See specification as filed for detailed description of substitutions and preferred embodiments
FQREGFGRQSMCEPR

SEQ ID NO: 1960 - protein, 15 aa, Artificial Sequence
  Description of Artificial Sequence: Synthetic peptide
  N-term H or Acetyl
  MOD_RES (10)..(10): Ser or Phospho-Ser
  MOD_RES (12)..(12): Modified Cys
  See specification as filed for detailed description of substitutions and preferred embodiments
FQREGFGRQSMCEQR

SEQ ID NO: 1961 - protein, 15 aa, Artificial Sequence
  Description of Artificial Sequence: Synthetic peptide
  N-term H or Acetyl
  MOD_RES (10)..(10): Ser or Phospho-Ser
  MOD_RES (12)..(12): Modified Cys
  See specification as filed for detailed description of substitutions and preferred embodiments
FQREGFGRQSMCERR

SEQ ID NO: 1962 - protein, 15 aa, Artificial Sequence
  Description of Artificial Sequence: Synthetic peptide
  N-term H or Acetyl
  MOD_RES (10)..(10): Ser or Phospho-Ser
  MOD_RES (12)..(12): Modified Cys
  See specification as filed for detailed description of substitutions and preferred embodiments
FQREGFGRQSMCEVR

SEQ ID NO: 1963 - protein, 15 aa, Artificial Sequence
  Description of Artificial Sequence: Synthetic peptide
  N-term H or Acetyl
  MOD_RES (10)..(10): Ser or Phospho-Ser
  MOD_RES (12)..(12): Modified Cys
  See specification as filed for detailed description of substitutions and preferred embodiments
FQREGFGRQSMCEWR

SEQ ID NO: 1964 - protein, 15 aa, Artificial Sequence
  Description of Artificial Sequence: Synthetic peptide
  N-term H or Acetyl
  MOD_RES (10)..(10): Ser or Phospho-Ser
  MOD_RES (12)..(12): Modified Cys
  See specification as filed for detailed description of substitutions and preferred embodiments
FQREGFGRQSMCFKR

SEQ ID NO: 1965 - protein, 15 aa, Artificial Sequence
  Description of Artificial Sequence: Synthetic peptide
  N-term H or Acetyl
  MOD_RES (10)..(10): Ser or Phospho-Ser
  MOD_RES (12)..(12): Modified Cys
  See specification as filed for detailed description of substitutions and preferred embodiments
FQREGFGRQSMCGKR

SEQ ID NO: 1966 - protein, 15 aa, Artificial Sequence
  Description of Artificial Sequence: Synthetic peptide
  N-term H or Acetyl
  MOD_RES (10)..(10): Ser or Phospho-Ser
  MOD_RES (12)..(12): Modified Cys
  See specification as filed for detailed description of substitutions and preferred embodiments
FQREGFGRQSMCHKR

SEQ ID NO: 1967 - protein, 15 aa, Artificial Sequence
  Description of Artificial Sequence: Synthetic peptide
  N-term H or Acetyl
  MOD_RES (10)..(10): Ser or Phospho-Ser
  MOD_RES (12)..(12): Modified Cys
  See specification as filed for detailed description of substitutions and preferred embodiments
FQREGFGRQSMCIKR

SEQ ID NO: 1968 - protein, 15 aa, Artificial Sequence
  Description of Artificial Sequence: Synthetic peptide
  N-term H or Acetyl
  MOD_RES (10)..(10): Ser or Phospho-Ser
  MOD_RES (12)..(12): Modified Cys
  See specification as filed for detailed description of substitutions and preferred embodiments
FQREGFGRQSMCKKR

SEQ ID NO: 1969 - protein, 15 aa, Artificial Sequence
  Description of Artificial Sequence: Synthetic peptide
  N-term H or Acetyl
  MOD_RES (10)..(10): Ser or Phospho-Ser
  MOD_RES (12)..(12): Modified Cys
  See specification as filed for detailed description of substitutions and preferred embodiments
FQREGFGRQSMCLKR

SEQ ID NO: 1970 - protein, 15 aa, Artificial Sequence
  Description of Artificial Sequence: Synthetic peptide
  N-term H or Acetyl
  MOD_RES (10)..(10): Ser or Phospho-Ser
  MOD_RES (12)..(12): Modified Cys
  See specification as filed for detailed description of substitutions and preferred embodiments
FQREGFGRQSMCNKR

SEQ ID NO: 1971 - protein, 15 aa, Artificial Sequence
  Description of Artificial Sequence: Synthetic peptide
  N-term H or Acetyl
  MOD_RES (10)..(10): Ser or Phospho-Ser
  MOD_RES (12)..(12): Modified Cys
  See specification as filed for detailed description of substitutions and preferred embodiments
FQREGFGRQSMCPKR

SEQ ID NO: 1972 - protein, 15 aa, Artificial Sequence
  Description of Artificial Sequence: Synthetic peptide
  N-term H or Acetyl
  MOD_RES (10)..(10): Ser or Phospho-Ser
  MOD_RES (12)..(12): Modified Cys
  See specification as filed for detailed description of substitutions and preferred embodiments
FQREGFGRQSMCQKR

SEQ ID NO: 1973 - protein, 15 aa, Artificial Sequence
  Description of Artificial Sequence: Synthetic peptide
  N-term H or Acetyl
  MOD_RES (10)..(10): Ser or Phospho-Ser
  MOD_RES (12)..(12): Modified Cys
  See specification as filed for detailed description of substitutions and preferred embodiments
FQREGFGRQSMCRKR

SEQ ID NO: 1974 - protein, 15 aa, Artificial Sequence
  Description of Artificial Sequence: Synthetic peptide
  N-term H or Acetyl
  MOD_RES (10)..(10): Ser or Phospho-Ser
  MOD_RES (12)..(12): Modified Cys
  See specification as filed for detailed description of substitutions and preferred embodiments
FQREGFGRQSMCVKR

SEQ ID NO: 1975 - protein, 15 aa, Artificial Sequence
  Description of Artificial Sequence: Synthetic peptide
  N-term H or Acetyl
  MOD_RES (10)..(10): Ser or Phospho-Ser
  MOD_RES (12)..(12): Modified Cys
  See specification as filed for detailed description of substitutions and preferred embodiments
FQREGFGRQSMCWKR

SEQ ID NO: 1976 - protein, 15 aa, Artificial Sequence
  Description of Artificial Sequence: Synthetic peptide
  N-term H or Acetyl
  MOD_RES (10)..(10): Ser or Phospho-Ser
  MOD_RES (12)..(12): Modified Cys
  See specification as filed for detailed description of substitutions and preferred embodiments
FQREGFGRQSNCEKR

SEQ ID NO: 1977 - protein, 15 aa, Artificial Sequence
  Description of Artificial Sequence: Synthetic peptide
  N-term H or Acetyl
  MOD_RES (10)..(10): Ser or Phospho-Ser
  MOD_RES (12)..(12): Modified Cys
  See specification as filed for detailed description of substitutions and preferred embodiments
FQREGFGRQSPCEKR

SEQ ID NO: 1978 - protein, 15 aa, Artificial Sequence
  Description of Artificial Sequence: Synthetic peptide
  N-term H or Acetyl
  MOD_RES (10)..(10): Ser or Phospho-Ser
  MOD_RES (12)..(12): Modified Cys
  See specification as filed for detailed description of substitutions and preferred embodiments
FQREGFGRQSQCEKR

SEQ ID NO: 1979 - protein, 15 aa, Artificial Sequence
  Description of Artificial Sequence: Synthetic peptide
  N-term H or Acetyl
  MOD_RES (10)..(10): Ser or Phospho-Ser
  MOD_RES (12)..(12): Modified Cys
  See specification as filed for detailed description of substitutions and preferred embodiments
FQREGFGRQSRCEKR

SEQ ID NO: 1980 - protein, 15 aa, Artificial Sequence
  Description of Artificial Sequence: Synthetic peptide
  N-term H or Acetyl
  MOD_RES (10)..(10): Ser or Phospho-Ser
  MOD_RES (12)..(12): Modified Cys
  See specification as filed for detailed description of substitutions and preferred embodiments
FQREGFGRQSVCEKR

SEQ ID NO: 1981 - protein, 15 aa, Artificial Sequence
  Description of Artificial Sequence: Synthetic peptide
  N-term H or Acetyl
  MOD_RES (10)..(10): Ser or Phospho-Ser
  MOD_RES (12)..(12): Modified Cys
  See specification as filed for detailed description of substitutions and preferred embodiments
FQREGFGRQSWCEKR

SEQ ID NO: 1982 - protein, 15 aa, Artificial Sequence
  Description of Artificial Sequence: Synthetic peptide
  N-term H or Acetyl
  MOD_RES (10)..(10): Ser or Phospho-Ser
  MOD_RES (12)..(12): Modified Cys
  See specification as filed for detailed description of substitutions and preferred embodiments
FQREGFGRRSMCEKR

SEQ ID NO: 1983 - protein, 15 aa, Artificial Sequence
  Description of Artificial Sequence: Synthetic peptide
  N-term H or Acetyl
  MOD_RES (10)..(10): Ser or Phospho-Ser
  MOD_RES (12)..(12): Modified Cys
  See specification as filed for detailed description of substitutions and preferred embodiments
FQREGFGRVSMCEKR

SEQ ID NO: 1984 - protein, 15 aa, Artificial Sequence
  Description of Artificial Sequence: Synthetic peptide
  N-term H or Acetyl
  MOD_RES (10)..(10): Ser or Phospho-Ser
  MOD_RES (12)..(12): Modified Cys
  See specification as filed for detailed description of substitutions and preferred embodiments
FQREGFGRWSMCEKR

SEQ ID NO: 1985 - protein, 15 aa, Artificial Sequence
  Description of Artificial Sequence: Synthetic peptide
  N-term H or Acetyl
  MOD_RES (10)..(10): Ser or Phospho-Ser
  MOD_RES (12)..(12): Modified Cys
  See specification as filed for detailed description of substitutions and preferred embodiments
FQREGFGVQSMCEKR

SEQ ID NO: 1986 - protein, 15 aa, Artificial Sequence
  Description of Artificial Sequence: Synthetic peptide
  N-term H or Acetyl
  MOD_RES (10)..(10): Ser or Phospho-Ser
  MOD_RES (12)..(12): Modified Cys
  See specification as filed for detailed description of substitutions and preferred embodiments
FQREGFGWQSMCEKR

SEQ ID NO: 1987 - protein, 15 aa, Artificial Sequence
  Description of Artificial Sequence: Synthetic peptide
  N-term H or Acetyl
  MOD_RES (10)..(10): Ser or Phospho-Ser
  MOD_RES (12)..(12): Modified Cys
  See specification as filed for detailed description of substitutions and preferred embodiments
FQREGFHRQSMCEKR

SEQ ID NO: 1988 - protein, 15 aa, Artificial Sequence
  Description of Artificial Sequence: Synthetic peptide
  N-term H or Acetyl
  MOD_RES (10)..(10): Ser or Phospho-Ser
  MOD_RES (12)..(12): Modified Cys
  See specification as filed for detailed description of substitutions and preferred embodiments
FQREGFIRQSMCEKR

SEQ ID NO: 1989 - protein, 15 aa, Artificial Sequence
  Description of Artificial Sequence: Synthetic peptide
  N-term H or Acetyl
  MOD_RES (10)..(10): Ser or Phospho-Ser
  MOD_RES (12)..(12): Modified Cys
  See specification as filed for detailed description of substitutions and preferred embodiments
FQREGFKRQSMCEKR

SEQ ID NO: 1990 - protein, 15 aa, Artificial Sequence
  Description of Artificial Sequence: Synthetic peptide
  N-term H or Acetyl
  MOD_RES (10)..(10): Ser or Phospho-Ser
  MOD_RES (12)..(12): Modified Cys
  See specification as filed for detailed description of substitutions and preferred embodiments
FQREGFLRQSMCEKR

SEQ ID NO: 1991 - protein, 15 aa, Artificial Sequence
  Description of Artificial Sequence: Synthetic peptide
  N-term H or Acetyl
  MOD_RES (10)..(10): Ser or Phospho-Ser
  MOD_RES (12)..(12): Modified Cys
  See specification as filed for detailed description of substitutions and preferred embodiments
FQREGFNRQSMCEKR

SEQ ID NO: 1992 - protein, 15 aa, Artificial Sequence
  Description of Artificial Sequence: Synthetic peptide
  N-term H or Acetyl
  MOD_RES (10)..(10): Ser or Phospho-Ser
  MOD_RES (12)..(12): Modified Cys
  See specification as filed for detailed description of substitutions and preferred embodiments
FQREGFPRQSMCEKR

SEQ ID NO: 1993 - protein, 15 aa, Artificial Sequence
  Description of Artificial Sequence: Synthetic peptide
  N-term H or Acetyl
  MOD_RES (10)..(10): Ser or Phospho-Ser
  MOD_RES (12)..(12): Modified Cys
  See specification as filed for detailed description of substitutions and preferred embodiments
FQREGFQRQSMCEKR

SEQ ID NO: 1994 - protein, 15 aa, Artificial Sequence
  Description of Artificial Sequence: Synthetic peptide
  N-term H or Acetyl
  MOD_RES (10)..(10): Ser or Phospho-Ser
  MOD_RES (12)..(12): Modified Cys
  See specification as filed for detailed description of substitutions and preferred embodiments
FQREGFRRQSMCEKR

SEQ ID NO: 1995 - protein, 15 aa, Artificial Sequence
  Description of Artificial Sequence: Synthetic peptide
  N-term H or Acetyl
  MOD_RES (10)..(10): Ser or Phospho-Ser
  MOD_RES (12)..(12): Modified Cys
  See specification as filed for detailed description of substitutions and preferred embodiments
FQREGFVRQSMCEKR

SEQ ID NO: 1996 - protein, 15 aa, Artificial Sequence
  Description of Artificial Sequence: Synthetic peptide
  N-term H or Acetyl
  MOD_RES (10)..(10): Ser or Phospho-Ser
  MOD_RES (12)..(12): Modified Cys
  See specification as filed for detailed description of substitutions and preferred embodiments
FQREGFWRQSMCEKR

SEQ ID NO: 1997 - protein, 15 aa, Artificial Sequence
  Description of Artificial Sequence: Synthetic peptide
  N-term H or Acetyl
  MOD_RES (10)..(10): Ser or Phospho-Ser
  MOD_RES (12)..(12): Modified Cys
  See specification as filed for detailed description of substitutions and preferred embodiments
FQREGGGRQSMCEKR

SEQ ID NO: 1998 - protein, 15 aa, Artificial Sequence
  Description of Artificial Sequence: Synthetic peptide
  N-term H or Acetyl
  MOD_RES (10)..(10): Ser or Phospho-Ser
  MOD_RES (12)..(12): Modified Cys
  See specification as filed for detailed description of substitutions and preferred embodiments
FQREGHGRQSMCEKR

SEQ ID NO: 1999 - protein, 15 aa, Artificial Sequence
  Description of Artificial Sequence: Synthetic peptide
  N-term H or Acetyl
  MOD_RES (10)..(10): Ser or Phospho-Ser
  MOD_RES (12)..(12): Modified Cys
  See specification as filed for detailed description of substitutions and preferred embodiments
FQREGIGRQSMCEKR

SEQ ID NO: 2000 - protein, 15 aa, Artificial Sequence
  Description of Artificial Sequence: Synthetic peptide
  N-term H or Acetyl
  MOD_RES (10)..(10): Ser or Phospho-Ser
  MOD_RES (12)..(12): Modified Cys
  See specification as filed for detailed description of substitutions and preferred embodiments
FQREGKGRQSMCEKR

SEQ ID NO: 2001 - protein, 15 aa, Artificial Sequence
  Description of Artificial Sequence: Synthetic peptide
  N-term H or Acetyl
  MOD_RES (10)..(10): Ser or Phospho-Ser
  MOD_RES (12)..(12): Modified Cys
  See specification as filed for detailed description of substitutions and preferred embodiments
FQREGLGRQSMCEKR

SEQ ID NO: 2002 - protein, 15 aa, Artificial Sequence
  Description of Artificial Sequence: Synthetic peptide
  N-term H or Acetyl
  MOD_RES (10)..(10): Ser or Phospho-Ser
  MOD_RES (12)..(12): Modified Cys
  See specification as filed for detailed description of substitutions and preferred embodiments
FQREGNGRQSMCEKR

SEQ ID NO: 2003 - protein, 15 aa, Artificial Sequence
  Description of Artificial Sequence: Synthetic peptide
  N-term H or Acetyl
  MOD_RES (10)..(10): Ser or Phospho-Ser
  MOD_RES (12)..(12): Modified Cys
  See specification as filed for detailed description of substitutions and preferred embodiments
FQREGPGRQSMCEKR

SEQ ID NO: 2004 - protein, 15 aa, Artificial Sequence
  Description of Artificial Sequence: Synthetic peptide
  N-term H or Acetyl
  MOD_RES (10)..(10): Ser or Phospho-Ser
  MOD_RES (12)..(12): Modified Cys
  See specification as filed for detailed description of substitutions and preferred embodiments
FQREGQGRQSMCEKR

SEQ ID NO: 2005 - protein, 15 aa, Artificial Sequence
  Description of Artificial Sequence: Synthetic peptide
  N-term H or Acetyl
  MOD_RES (10)..(10): Ser or Phospho-Ser
  MOD_RES (12)..(12): Modified Cys
  See specification as filed for detailed description of substitutions and preferred embodiments
FQREGRGRQSMCEKR

SEQ ID NO: 2006 - protein, 15 aa, Artificial Sequence
  Description of Artificial Sequence: Synthetic peptide
  N-term H or Acetyl
  MOD_RES (10)..(10): Ser or Phospho-Ser
  MOD_RES (12)..(12): Modified Cys
  See specification as filed for detailed description of substitutions and preferred embodiments
FQREGVGRQSMCEKR

SEQ ID NO: 2007 - protein, 15 aa, Artificial Sequence
  Description of Artificial Sequence: Synthetic peptide
  N-term H or Acetyl
  MOD_RES (10)..(10): Ser or Phospho-Ser
  MOD_RES (12)..(12): Modified Cys
  See specification as filed for detailed description of substitutions and preferred embodiments
FQREGWGRQSMCEKR

SEQ ID NO: 2008 - protein, 15 aa, Artificial Sequence
  Description of Artificial Sequence: Synthetic peptide
  N-term H or Acetyl
  MOD_RES (10)..(10): Ser or Phospho-Ser
  MOD_RES (12)..(12): Modified Cys
  See specification as filed for detailed description of substitutions and preferred embodiments
FQREHFGRQSMCEKR

SEQ ID NO: 2009 - protein, 15 aa, Artificial Sequence
  Description of Artificial Sequence: Synthetic peptide
  N-term H or Acetyl
  MOD_RES (10)..(10): Ser or Phospho-Ser
  MOD_RES (12)..(12): Modified Cys
  See specification as filed for detailed description of substitutions and preferred embodiments
FQREIFGRQSMCEKR

SEQ ID NO: 2010 - protein, 15 aa, Artificial Sequence
  Description of Artificial Sequence: Synthetic peptide
  N-term H or Acetyl
  MOD_RES (10)..(10): Ser or Phospho-Ser
  MOD_RES (12)..(12): Modified Cys
  See specification as filed for detailed description of substitutions and preferred embodiments
FQREKFGRQSMCEKR

SEQ ID NO: 2011 - protein, 15 aa, Artificial Sequence
  Description of Artificial Sequence: Synthetic peptide
  N-term H or Acetyl
  MOD_RES (10)..(10): Ser or Phospho-Ser
  MOD_RES (12)..(12): Modified Cys
  See specification as filed for detailed description of substitutions and preferred embodiments
FQRELFGRQSMCEKR

SEQ ID NO: 2012 - protein, 15 aa, Artificial Sequence
  Description of Artificial Sequence: Synthetic peptide
  N-term H or Acetyl
  MOD_RES (10)..(10): Ser or Phospho-Ser
  MOD_RES (12)..(12): Modified Cys
  See specification as filed for detailed description of substitutions and preferred embodiments
FQRENFGRQSMCEKR

SEQ ID NO: 2013 - protein, 15 aa, Artificial Sequence
  Description of Artificial Sequence: Synthetic peptide
  N-term H or Acetyl
  MOD_RES (10)..(10): Ser or Phospho-Ser
  MOD_RES (12)..(12): Modified Cys
  See specification as filed for detailed description of substitutions and preferred embodiments
FQREPFGRQSMCEKR

SEQ ID NO: 2014 - protein, 15 aa, Artificial Sequence
  Description of Artificial Sequence: Synthetic peptide
  N-term H or Acetyl
  MOD_RES (10)..(10): Ser or Phospho-Ser
  MOD_RES (12)..(12): Modified Cys
  See specification as filed for detailed description of substitutions and preferred embodiments
FQREQFGRQSMCEKR

SEQ ID NO: 2015 - protein, 15 aa, Artificial Sequence
  Description of Artificial Sequence: Synthetic peptide
  N-term H or Acetyl
  MOD_RES (10)..(10): Ser or Phospho-Ser
  MOD_RES (12)..(12): Modified Cys
  See specification as filed for detailed description of substitutions and preferred embodiments
FQRERFGRQSMCEKR

SEQ ID NO: 2016 - protein, 15 aa, Artificial Sequence
  Description of Artificial Sequence: Synthetic peptide
  N-term H or Acetyl
  MOD_RES (10)..(10): Ser or Phospho-Ser
  MOD_RES (12)..(12): Modified Cys
  See specification as filed for detailed description of substitutions and preferred embodiments
FQREVFGRQSMCEKR

SEQ ID NO: 2017 - protein, 15 aa, Artificial Sequence
  Description of Artificial Sequence: Synthetic peptide
  N-term H or Acetyl
  MOD_RES (10)..(10): Ser or Phospho-Ser
  MOD_RES (12)..(12): Modified Cys
  See specification as filed for detailed description of substitutions and preferred embodiments
FQREWFGRQSMCEKR

SEQ ID NO: 2018 - protein, 15 aa, Artificial Sequence
  Description of Artificial Sequence: Synthetic peptide
  N-term H or Acetyl
  MOD_RES (10)..(10): Ser or Phospho-Ser
  MOD_RES (12)..(12): Modified Cys
  See specification as filed for detailed description of substitutions and preferred embodiments
FQRFGFGRQSMCEKR

SEQ ID NO: 2019 - protein, 15 aa, Artificial Sequence
  Description of Artificial Sequence: Synthetic peptide
  N-term H or Acetyl
  MOD_RES (10)..(10): Ser or Phospho-Ser
  MOD_RES (12)..(12): Modified Cys
  See specification as filed for detailed description of substitutions and preferred embodiments
FQRGGFGRQSMCEKR

SEQ ID NO: 2020 - protein, 15 aa, Artificial Sequence
  Description of Artificial Sequence: Synthetic peptide
  N-term H or Acetyl
  MOD_RES (10)..(10): Ser or Phospho-Ser
  MOD_RES (12)..(12): Modified Cys
  See specification as filed for detailed description of substitutions and preferred embodiments
FQRHGFGRQSMCEKR

SEQ ID NO: 2021 - protein, 15 aa, Artificial Sequence
  Description of Artificial Sequence: Synthetic peptide
  N-term H or Acetyl
  MOD_RES (10)..(10): Ser or Phospho-Ser
  MOD_RES (12)..(12): Modified Cys
  See specification as filed for detailed description of substitutions and preferred embodiments
FQRIGFGRQSMCEKR

SEQ ID NO: 2022 - protein, 15 aa, Artificial Sequence
  Description of Artificial Sequence: Synthetic peptide
  N-term H or Acetyl
  MOD_RES (10)..(10): Ser or Phospho-Ser
  MOD_RES (12)..(12): Modified Cys
  See specification as filed for detailed description of substitutions and preferred embodiments
FQRKGFGRQSMCEKR

SEQ ID NO: 2023 - protein, 15 aa, Artificial Sequence
  Description of Artificial Sequence: Synthetic peptide
  N-term H or Acetyl
  MOD_RES (10)..(10): Ser or Phospho-Ser
  MOD_RES (12)..(12): Modified Cys
  See specification as filed for detailed description of substitutions and preferred embodiments
FQRLGFGRQSMCEKR

SEQ ID NO: 2024 - protein, 15 aa, Artificial Sequence
  Description of Artificial Sequence: Synthetic peptide
  N-term H or Acetyl
  MOD_RES (10)..(10): Ser or Phospho-Ser
  MOD_RES (12)..(12): Modified Cys
  See specification as filed for detailed description of substitutions and preferred embodiments
FQRNGFGRQSMCEKR

SEQ ID NO: 2025 - protein, 15 aa, Artificial Sequence
  Description of Artificial Sequence: Synthetic peptide
  N-term H or Acetyl
  MOD_RES (10)..(10): Ser or Phospho-Ser
  MOD_RES (12)..(12): Modified Cys
  See specification as filed for detailed description of substitutions and preferred embodiments
FQRPGFGRQSMCEKR

SEQ ID NO: 2026 - protein, 15 aa, Artificial Sequence
  Description of Artificial Sequence: Synthetic peptide
  N-term H or Acetyl
  MOD_RES (10)..(10): Ser or Phospho-Ser
  MOD_RES (12)..(12): Modified Cys
  See specification as filed for detailed description of substitutions and preferred embodiments
FQRQGFGRQSMCEKR

SEQ ID NO: 2027 - protein, 15 aa, Artificial Sequence
  Description of Artificial Sequence: Synthetic peptide
  N-term H or Acetyl
  MOD_RES (10)..(10): Ser or Phospho-Ser
  MOD_RES (12)..(12): Modified Cys
  See specification as filed for detailed description of substitutions and preferred embodiments
FQRRGFGRQSMCEKR

SEQ ID NO: 2028 - protein, 15 aa, Artificial Sequence
  Description of Artificial Sequence: Synthetic peptide
  N-term H or Acetyl
  MOD_RES (10)..(10): Ser or Phospho-Ser
  MOD_RES (12)..(12): Modified Cys
  See specification as filed for detailed description of substitutions and preferred embodiments
FQRVGFGRQSMCEKR

SEQ ID NO: 2029 - protein, 15 aa, Artificial Sequence
  Description of Artificial Sequence: Synthetic peptide
  N-term H or Acetyl
  MOD_RES (10)..(10): Ser or Phospho-Ser
  MOD_RES (12)..(12): Modified Cys
  See specification as filed for detailed description of substitutions and preferred embodiments
FQRWGFGRQSMCEKR

SEQ ID NO: 2030 - protein, 15 aa, Artificial Sequence
  Description of Artificial Sequence: Synthetic peptide
  N-term H or Acetyl
  MOD_RES (10)..(10): Ser or Phospho-Ser
  MOD_RES (12)..(12): Modified Cys
  See specification as filed for detailed description of substitutions and preferred embodiments
FQVEGFGRQSMCEKR

SEQ ID NO: 2031 - protein, 15 aa, Artificial Sequence
  Description of Artificial Sequence: Synthetic peptide
  N-term H or Acetyl
  MOD_RES (10)..(10): Ser or Phospho-Ser
  MOD_RES (12)..(12): Modified Cys
  See specification as filed for detailed description of substitutions and preferred embodiments
FQWEGFGRQSMCEKR

SEQ ID NO: 2032 - protein, 10 aa, Artificial Sequence
  Description of Artificial Sequence: Synthetic peptide
  N-term H or Acetyl
  MOD_RES (4)..(4): Modified Cys
  MOD_RES (6)..(6): Ser or Phospho-Ser
  See specification as filed for detailed description of substitutions and preferred embodiments
FRRCASFRRR

SEQ ID NO: 2033 - protein, 15 aa, Artificial Sequence
  Description of Artificial Sequence: Synthetic peptide
  N-term H or Acetyl
  MOD_RES (10)..(10): Ser or Phospho-Ser
  MOD_RES (12)..(12): Modified Cys
  See specification as filed for detailed description of substitutions and preferred embodiments
FRREGFGRQSMCEKR

SEQ ID NO: 2034 - protein, 15 aa, Artificial Sequence
  Description of Artificial Sequence: Synthetic peptide
  N-term H or Acetyl
  MOD_RES (10)..(10): Ser or Phospho-Ser
  MOD_RES (12)..(12): Modified Cys
  See specification as filed for detailed description of substitutions and preferred embodiments
FVREGFGRQSMCEKR

SEQ ID NO: 2035 - protein, 15 aa, Artificial Sequence
  Description of Artificial Sequence: Synthetic peptide
  N-term H or Acetyl
  MOD_RES (10)..(10): Ser or Phospho-Ser
  MOD_RES (12)..(12): Modified Cys
  See specification as filed for detailed description of substitutions and preferred embodiments
FWREGFGRQSMCEKR

SEQ ID NO: 2036 - protein, 18 aa, Artificial Sequence
  Description of Artificial Sequence: Synthetic peptide
  N-term H or Acetyl
  MOD_RES (14)..(14): Ser or Phospho-Ser
  MOD_RES (16)..(16): Modified Cys
  See specification as filed for detailed description of substitutions and preferred embodiments
GAKTTKKRPQRATSNCFS

SEQ ID NO: 2037 - protein, 18 aa, Artificial Sequence
  Description of Artificial Sequence: Synthetic peptide
  N-term H or Acetyl
  MOD_RES (16)..(16): Modified Cys
  MOD_RES (18)..(18): Ser or Phospho-Ser
  See specification as filed for detailed description of substitutions and preferred embodiments
GAKTTKKRPQRATSNCFS

SEQ ID NO: 2038 - protein, 20 aa, Artificial Sequence
  Description of Artificial Sequence: Synthetic peptide
  N-term H or Acetyl
  MOD_RES (8)..(8): Modified Cys
  MOD_RES (10)..(10): Thr or Phospho-Thr
  See specification as filed for detailed description of substitutions and preferred embodiments
GANPLMACGTLTRRHQNGRF

SEQ ID NO: 2039 - protein, 10 aa, Artificial Sequence
  Description of Artificial Sequence: Synthetic peptide
  N-term H or Acetyl
  MOD_RES (2)..(2): Modified Cys
  MOD_RES (4)..(4): Ser or Phospho-Ser
  See specification as filed for detailed description of substitutions and preferred embodiments
GCDSLRRKAK

SEQ ID NO: 2040 - protein, 8 aa, Artificial Sequence
  Description of Artificial Sequence: Synthetic peptide
  N-term H or Acetyl
  MOD_RES (2)..(2): Modified Cys
  MOD_RES (4)..(4): Ser or Phospho-Ser
  See specification as filed for detailed description of substitutions and preferred embodiments
GCLSPGPF

SEQ ID NO: 2041 - protein, 15 aa, Artificial Sequence
  Description of Artificial Sequence: Synthetic peptide
  N-term H or Acetyl
  MOD_RES (4)..(4): Ser or Phospho-Ser
  MOD_RES (6)..(6): Modified Cys
  MOD_RES (9)..(9): Tyr or Phospho-Tyr
  See specification as filed for detailed description of substitutions and preferred embodiments
GDGSDCPYYNSIPSK

SEQ ID NO: 2042 - protein, 15 aa, Artificial Sequence
  Description of Artificial Sequence: Synthetic peptide
  N-term H or Acetyl
  MOD_RES (4)..(4): Ser or Phospho-Ser
  MOD_RES (6)..(6): Modified Cys
  See specification as filed for detailed description of substitutions and preferred embodiments
GDGSDCPYYNSIPSK

SEQ ID NO: 2043 - protein, 15 aa, Artificial Sequence
  Description of Artificial Sequence: Synthetic peptide
  N-term H or Acetyl
  MOD_RES (4)..(4): Ser or Phospho-Ser
  MOD_RES (6)..(6): Modified Cys
  See specification as filed for detailed description of substitutions and preferred embodiments
GEKSFCRSVVGTPAY

SEQ ID NO: 2044 - protein, 15 aa, Artificial Sequence
  Description of Artificial Sequence: Synthetic peptide
  N-term H or Acetyl
  MOD_RES (6)..(6): Modified Cys
  MOD_RES (8)..(8): Ser or Phospho-Ser
  See specification as filed for detailed description of substitutions and preferred embodiments
GEKSFCRSVVGTPAY

SEQ ID NO: 2045 - protein, 15 aa, Artificial Sequence
  Description of Artificial Sequence: Synthetic peptide
  N-term H or Acetyl
  MOD_RES (8)..(8): Ser or Phospho-Ser
  MOD_RES (10)..(10): Modified Cys
  See specification as filed for detailed description of substitutions and preferred embodiments
GEKSFRRSVCGTPAY

SEQ ID NO: 2046 - protein, 15 aa, Artificial Sequence
  Description of Artificial Sequence: Synthetic peptide
  N-term H or Acetyl
  MOD_RES (10)..(10): Modified Cys
  MOD_RES (12)..(12): Thr or Phospho-Thr
  See specification as filed for detailed description of substitutions and preferred embodiments
GEKSFRRSVCGTPAY

SEQ ID NO: 2047 - protein, 15 aa, Artificial Sequence
  Description of Artificial Sequence: Synthetic peptide
  N-term H or Acetyl
  MOD_RES (8)..(8): Thr or Phospho-Thr
  MOD_RES (10)..(10): Modified Cys
  See specification as filed for detailed description of substitutions and preferred embodiments
GETSLMRTLCGTPTY

SEQ ID NO: 2048 - protein, 15 aa, Artificial Sequence
  Description of Artificial Sequence: Synthetic peptide
  N-term H or Acetyl
  MOD_RES (10)..(10): Modified Cys
  MOD_RES (12)..(12): Thr or Phospho-Thr
  See specification as filed for detailed description of substitutions and preferred embodiments
GETSLMRTLCGTPTY

SEQ ID NO: 2049 - protein, 15 aa, Artificial Sequence
  Description of Artificial Sequence: Synthetic peptide
  N-term H or Acetyl
  MOD_RES (10)..(10): Modified Cys
  MOD_RES (12)..(12): Ser or Phospho-Ser
  See specification as filed for detailed description of substitutions and preferred embodiments
GGPEPGPYACPSVNT

SEQ ID NO: 2050 - protein, 13 aa, Artificial Sequence
  Description of Artificial Sequence: Synthetic peptide
  N-term H or Acetyl
  MOD_RES (6)..(6): Thr or Phospho-Thr
  MOD_RES (8)..(8): Modified Cys
  See specification as filed for detailed description of substitutions and preferred embodiments
GGSSGTSCEKGPE

SEQ ID NO: 2051 - protein, 15 aa, Artificial Sequence
  Description of Artificial Sequence: Synthetic peptide
  N-term H or Acetyl
  MOD_RES (8)..(8): Ser or Phospho-Ser
  MOD_RES (10)..(10): Modified Cys
  See specification as filed for detailed description of substitutions and preferred embodiments
GHVEEPASPCAAYQK

SEQ ID NO: 2052 - protein, 16 aa, Artificial Sequence
  Description of Artificial Sequence: Synthetic peptide
  N-term H or Acetyl
  MOD_RES (10)..(10): Ser or Phospho-Ser
  MOD_RES (12)..(12): Modified Cys
  See specification as filed for detailed description of substitutions and preferred embodiments
GKKALRRQESVCALGW

SEQ ID NO: 2053 - protein, 11 aa, Artificial Sequence
  Description of Artificial Sequence: Synthetic peptide
  N-term H or Acetyl
  MOD_RES (6)..(6): Modified Cys
  MOD_RES (8)..(8): Ser or Phospho-Ser
  See specification as filed for detailed description of substitutions and preferred embodiments
GKKATCASQEY

SEQ ID NO: 2054 - protein, 11 aa, Artificial Sequence
  Description of Artificial Sequence: Synthetic peptide
  N-term H or Acetyl
  MOD_RES (8)..(8): Ser or Phospho-Ser
  MOD_RES (10)..(10): Modified Cys
  See specification as filed for detailed description of substitutions and preferred embodiments
GKKATQASQCY

SEQ ID NO: 2055 - protein, 15 aa, Artificial Sequence
  Description of Artificial Sequence: Synthetic peptide
  N-term H or Acetyl
  MOD_RES (8)..(8): Thr or Phospho-Thr
  MOD_RES (10)..(10): Modified Cys
  See specification as filed for detailed description of substitutions and preferred embodiments
GKRPQRATSCVFAMF

SEQ ID NO: 2056 - protein, 12 aa, Artificial Sequence
  Description of Artificial Sequence: Synthetic peptide
  N-term H or Acetyl
  MOD_RES (5)..(5): Modified Cys
  MOD_RES (7)..(7): Ser or Phospho-Ser
  See specification as filed for detailed description of substitutions and preferred embodiments
GLLRCSSRRIRR

SEQ ID NO: 2057 - protein, 15 aa, Artificial Sequence
  Description of Artificial Sequence: Synthetic peptide
  N-term H or Acetyl
  MOD_RES (8)..(8): Ser or Phospho-Ser
  MOD_RES (10)..(10): Modified Cys
  See specification as filed for detailed description of substitutions and preferred embodiments
GLSGRKSSTCSPTSP

SEQ ID NO: 2058 - protein, 12 aa, Artificial Sequence
  Description of Artificial Sequence: Synthetic peptide
  N-term H or Acetyl
  MOD_RES (6)..(6): Leu or Nle (i.e. isomer of Leucine)
  MOD_RES (7)..(7): Ser or Phospho-Ser
  MOD_RES (9)..(9): Modified Cys
  See specification as filed for detailed description of substitutions and preferred embodiments
GNLLPLSPCEFD

SEQ ID NO: 2059 - protein, 15 aa, Artificial Sequence
  Description of Artificial Sequence: Synthetic peptide
  N-term H or Acetyl
  MOD_RES (4)..(4): Modified Cys
  MOD_RES (6)..(6): Ser or Phospho-Ser
  MOD_RES (7)..(7): Leu or Nle (i.e. isomer of Leucine)
  See specification as filed for detailed description of substitutions and preferred embodiments
GQLCDSLANSFVGTR

SEQ ID NO: 2060 - protein, 15 aa, Artificial Sequence
  Description of Artificial Sequence: Synthetic peptide
  N-term H or Acetyl
  MOD_RES (6)..(6): Ser or Phospho-Ser
  MOD_RES (7)..(7): Leu or Nle (i.e. isomer of Leucine)
  MOD_RES (8)..(8): Modified Cys
  See specification as filed for detailed description of substitutions and preferred embodiments
GQLIDSLCNSFVGTR

SEQ ID NO: 2061 - protein, 15 aa, Artificial Sequence
  Description of Artificial Sequence: Synthetic peptide
  N-term H or Acetyl
  MOD_RES (7)..(7): Leu or Nle (i.e. isomer of Leucine)
  MOD_RES (10)..(10): Ser or Phospho-Ser
  MOD_RES (12)..(12): Modified Cys
  See specification as filed for detailed description of substitutions and preferred embodiments
GQLIDSLANSFCGTR

SEQ ID NO: 2062 - protein, 15 aa, Artificial Sequence
  Description of Artificial Sequence: Synthetic peptide
  N-term H or Acetyl
  MOD_RES (7)..(7): Leu or Nle (i.e. isomer of Leucine)
  MOD_RES (12)..(12): Modified Cys
  MOD_RES (14)..(14): Thr or Phospho-Thr
  See specification as filed for detailed description of substitutions and preferred embodiments
GQLIDSLANSFCGTR

SEQ ID NO: 2063 - protein, 15 aa, Artificial Sequence
  Description of Artificial Sequence: Synthetic peptide
  N-term H or Acetyl
  MOD_RES (7)..(7): Leu or Nle (i.e. isomer of Leucine)
  MOD_RES (8)..(8): Modified Cys
  MOD_RES (10)..(10): Ser or Phospho-Ser
  See specification as filed for detailed description of substitutions and preferred embodiments
GQLIDSLCNSFVGTR

SEQ ID NO: 2064 - protein, 15 aa, Artificial Sequence
  Description of Artificial Sequence: Synthetic peptide
  N-term H or Acetyl
  MOD_RES (10)..(10): Ser or Phospho-Ser
  MOD_RES (12)..(12): Modified Cys
  See specification as filed for detailed description of substitutions and preferred embodiments
GQREGFGRQSMCEKR

SEQ ID NO: 2065 - protein, 14 aa, Artificial Sequence
  Description of Artificial Sequence: Synthetic peptide
  N-term H or Acetyl
  MOD_RES (5)..(5): Modified Cys
  MOD_RES (7)..(7): Thr or Phospho-Thr
  See specification as filed for detailed description of substitutions and preferred embodiments
GRDKCKTLRQIRQG

SEQ ID NO: 2066 - protein, 14 aa, Artificial Sequence
  Description of Artificial Sequence: Synthetic peptide
  N-term H or Acetyl
  MOD_RES (7)..(7): Thr or Phospho-Thr
  MOD_RES (9)..(9): Modified Cys
  See specification as filed for detailed description of substitutions and preferred embodiments
GRDKYKTLCQIRQG

SEQ ID NO: 2067 - protein, 15 aa, Artificial Sequence
  Description of Artificial Sequence: Synthetic peptide
  N-term H or Acetyl
  MOD_RES (6)..(6): Modified Cys
  MOD_RES (8)..(8): Ser or Phospho-Ser
  See specification as filed for detailed description of substitutions and preferred embodiments
GREKRCNSQSYIGRP

SEQ ID NO: 2068 - protein, 15 aa, Artificial Sequence
  Description of Artificial Sequence: Synthetic peptide
  N-term H or Acetyl
  MOD_RES (8)..(8): Ser or Phospho-Ser
  MOD_RES (10)..(10): Modified Cys
  See specification as filed for detailed description of substitutions and preferred embodiments
GREKRSNSQCYIGRP

SEQ ID NO: 2069 - protein, 11 aa, Artificial Sequence
  Description of Artificial Sequence: Synthetic peptide
  N-term H or Acetyl
  MOD_RES (5)..(5): Modified Cys
  MOD_RES (7)..(7): Ser or Phospho-Ser
  See specification as filed for detailed description of substitutions and preferred embodiments
GRPRCSSFAEG

SEQ ID NO: 2070 - protein, 10 aa, Artificial Sequence
  Description of Artificial Sequence: Synthetic peptide
  N-term H or Acetyl
  MOD_RES (4)..(4): Modified Cys
  MOD_RES (6)..(6): Ser or Phospho-Ser
  See specification as filed for detailed description of substitutions and preferred embodiments
GRRCASFRRR

SEQ ID NO: 2071 - protein, 14 aa, Artificial Sequence
  Description of Artificial Sequence: Synthetic peptide
  N-term H or Acetyl
  MOD_RES (8)..(8): Ser or Phospho-Ser
  MOD_RES (10)..(10): Modified Cys
  See specification as filed for detailed description of substitutions and preferred embodiments
GSASASGSPCDPGF

SEQ ID NO: 2072 - protein, 15 aa, Artificial Sequence
  Description of Artificial Sequence: Synthetic peptide
  N-term H or Acetyl
  MOD_RES (10)..(10): Modified Cys
  MOD_RES (11)..(11): Leu or Nle (i.e. isomer of Leucine)
  MOD_RES (12)..(12): Ser or Phospho-Ser
  See specification as filed for detailed description of substitutions and preferred embodiments
GSNQEEAYVCLSSFY

SEQ ID NO: 2073 - protein, 15 aa, Artificial Sequence
  Description of Artificial Sequence: Synthetic peptide
  N-term H or Acetyl
  MOD_RES (6)..(6): Modified Cys
  MOD_RES (8)..(8): Ser or Phospho-Ser
  See specification as filed for detailed description of substitutions and preferred embodiments
GVRRRCLSNVSLTGV

SEQ ID NO: 2074 - protein, 15 aa, Artificial Sequence
  Description of Artificial Sequence: Synthetic peptide
  N-term H or Acetyl
  MOD_RES (8)..(8): Ser or Phospho-Ser
  MOD_RES (10)..(10): Modified Cys
  See specification as filed for detailed description of substitutions and preferred embodiments
GVRRRRLSNCSLTGV

SEQ ID NO: 2075 - protein, 26 aa, Artificial Sequence
  Description of Artificial Sequence: Synthetic peptide
  N-term H or Acetyl
  MOD_RES (7)..(7): Modified Cys
  MOD_RES (10)..(10): Ser or Phospho-Ser
  See specification as filed for detailed description of substitutions and preferred embodiments
GYAKDVCQGSLCTSFVGTLQYLAKKK

SEQ ID NO: 2076 - protein, 26 aa, Artificial Sequence
  Description of Artificial Sequence: Synthetic peptide
  N-term H or Acetyl
  MOD_RES (10)..(10): Ser or Phospho-Ser
  MOD_RES (12)..(12): Modified Cys
  See specification as filed for detailed description of substitutions and preferred embodiments
GYAKDVDQGSLCTSFVGTLQYLAKKK

SEQ ID NO: 2077 - protein, 26 aa, Artificial Sequence
  Description of Artificial Sequence: Synthetic peptide
  N-term H or Acetyl
  MOD_RES (12)..(12): Modified Cys
  MOD_RES (14)..(14): Ser or Phospho-Ser
  See specification as filed for detailed description of substitutions and preferred embodiments
GYAKDVDQGSLCTSFVGTLQYLAKKK

SEQ ID NO: 2078 - protein, 23 aa, Artificial Sequence
  Description of Artificial Sequence: Synthetic peptide
  N-term H or Acetyl
  MOD_RES (14)..(14): Ser or Phospho-Ser
  MOD_RES (16)..(16): Modified Cys
  See specification as filed for detailed description of substitutions and preferred embodiments
GYAKDVDQGSLCTSFCGTLQYLA

SEQ ID NO: 2079 - protein, 23 aa, Artificial Sequence
  Description of Artificial Sequence: Synthetic peptide
  N-term H or Acetyl
  MOD_RES (16)..(16): Modified Cys
  MOD_RES (18)..(18): Thr or Phospho-Thr
  See specification as filed for detailed description of substitutions and preferred embodiments
GYAKDVDQGSLCTSFCGTLQYLA

SEQ ID NO: 2080 - protein, 18 aa, Artificial Sequence
  Description of Artificial Sequence: Synthetic peptide
  N-term H or Acetyl
  MOD_RES (14)..(14): Ser or Phospho-Ser
  MOD_RES (16)..(16): Modified Cys
  See specification as filed for detailed description of substitutions and preferred embodiments
HAKTTKKRPQRATSNCFS

SEQ ID NO: 2081 - protein, 18 aa, Artificial Sequence
  Description of Artificial Sequence: Synthetic peptide
  N-term H or Acetyl
  MOD_RES (16)..(16): Modified Cys
  MOD_RES (18)..(18): Ser or Phospho-Ser
  See specification as filed for detailed description of substitutions and preferred embodiments
HAKTTKKRPQRATSNCFS

SEQ ID NO: 2082 - protein, 20 aa, Artificial Sequence
  Description of Artificial Sequence: Synthetic peptide
  N-term H or Acetyl
  MOD_RES (8)..(8): Modified Cys
  MOD_RES (10)..(10): Thr or Phospho-Thr
  See specification as filed for detailed description of substitutions and preferred embodiments
HANPLMACGTLTRRHQNGRF

SEQ ID NO: 2083 - protein, 10 aa, Artificial Sequence
  Description of Artificial Sequence: Synthetic peptide
  N-term H or Acetyl
  MOD_RES (2)..(2): Modified Cys
  MOD_RES (4)..(4): Ser or Phospho-Ser
  See specification as filed for detailed description of substitutions and preferred embodiments
HCDSLRRKAK

SEQ ID NO: 2084 - protein, 8 aa, Artificial Sequence
  Description of Artificial Sequence: Synthetic peptide
  N-term H or Acetyl
  MOD_RES (2)..(2): Modified Cys
  MOD_RES (4)..(4): Ser or Phospho-Ser
  See specification as filed for detailed description of substitutions and preferred embodiments
HCLSPGPF

SEQ ID NO: 2085 - protein, 15 aa, Artificial Sequence
  Description of Artificial Sequence: Synthetic peptide
  N-term H or Acetyl
  MOD_RES (8)..(8): Thr or Phospho-Thr
  MOD_RES (10)..(10): Modified Cys
  See specification as filed for detailed description of substitutions and preferred embodiments
HKRPQRATSCVFAMF

SEQ ID NO: 2086 - protein, 12 aa, Artificial Sequence
  Description of Artificial Sequence: Synthetic peptide
  N-term H or Acetyl
  MOD_RES (5)..(5): Modified Cys
  MOD_RES (7)..(7): Ser or Phospho-Ser
  See specification as filed for detailed description of substitutions and preferred embodiments
HLLRCSSRRIRR

SEQ ID NO: 2087 - protein, 21 aa, Artificial Sequence
  Description of Artificial Sequence: Synthetic peptide
  N-term H or Acetyl
  MOD_RES (7)..(7): Modified Cys
  MOD_RES (9)..(9): Thr or Phospho-Thr
  See specification as filed for detailed description of substitutions and preferred embodiments
HLPWWRCYTWVVERDVNTKQR

SEQ ID NO: 2088 - protein, 15 aa, Artificial Sequence
  Description of Artificial Sequence: Synthetic peptide
  N-term H or Acetyl
  MOD_RES (10)..(10): Ser or Phospho-Ser
  MOD_RES (12)..(12): Modified Cys
  See specification as filed for detailed description of substitutions and preferred embodiments
HQREGFGRQSMCEKR

SEQ ID NO: 2089 - protein, 10 aa, Artificial Sequence
  Description of Artificial Sequence: Synthetic peptide
  N-term H or Acetyl
  MOD_RES (4)..(4): Modified Cys
  MOD_RES (6)..(6): Ser or Phospho-Ser
  See specification as filed for detailed description of substitutions and preferred embodiments
HRRCASFRRR

SEQ ID NO: 2090 - protein, 12 aa, Artificial Sequence
  Description of Artificial Sequence: Synthetic peptide
  N-term H or Acetyl
  MOD_RES (2)..(2): Leu or Nle (i.e. isomer of Leucine)
  MOD_RES (5)..(5): Modified Cys
  MOD_RES (7)..(7): Ser or Phospho-Ser
  See specification as filed for detailed description of substitutions and preferred embodiments
ILLRCSSRRIRR

SEQ ID NO: 2091 - protein, 15 aa, Artificial Sequence
  Description of Artificial Sequence: Synthetic peptide
  N-term H or Acetyl
  MOD_RES (6)..(6): Modified Cys
  MOD_RES (8)..(8): Ser or Phospho-Ser
  MOD_RES (11)..(11): Leu or Nle (i.e. isomer of Leucine)
  See specification as filed for detailed description of substitutions and preferred embodiments
IADLGCASFKLWSKL

SEQ ID NO: 2092 - protein, 15 aa, Artificial Sequence
  Description of Artificial Sequence: Synthetic peptide
  N-term H or Acetyl
  MOD_RES (6)..(6): Modified Cys
  MOD_RES (8)..(8): Ser or Phospho-Ser
  See specification as filed for detailed description of substitutions and preferred embodiments
IADLGCASFKMWSKL

SEQ ID NO: 2093 - protein, 15 aa, Artificial Sequence
  Description of Artificial Sequence: Synthetic peptide
  N-term H or Acetyl
  MOD_RES (8)..(8): Ser or Phospho-Ser
  MOD_RES (10)..(10): Modified Cys
  MOD_RES (11)..(11): Leu or Nle (i.e. isomer of Leucine)
  See specification as filed for detailed description of substitutions and preferred embodiments
IADLGLASFCLWSKL

SEQ ID NO: 2094 - protein, 18 aa, Artificial Sequence
  Description of Artificial Sequence: Synthetic peptide
  N-term H or Acetyl
  MOD_RES (14)..(14): Ser or Phospho-Ser
  MOD_RES (16)..(16): Modified Cys
  See specification as filed for detailed description of substitutions and preferred embodiments
IAKTTKKRPQRATSNCFS

SEQ ID NO: 2095 - protein, 18 aa, Artificial Sequence
  Description of Artificial Sequence: Synthetic peptide
  N-term H or Acetyl
  MOD_RES (16)..(16): Modified Cys
  MOD_RES (18)..(18): Ser or Phospho-Ser
  See specification as filed for detailed description of substitutions and preferred embodiments
IAKTTKKRPQRATSNCFS

SEQ ID NO: 2096 - protein, 12 aa, Artificial Sequence
  Description of Artificial Sequence: Synthetic peptide
  N-term H or Acetyl
  MOD_RES (5)..(5): Modified Cys
  MOD_RES (7)..(7): Ser or Phospho-Ser
  See specification as filed for detailed description of substitutions and preferred embodiments
IALRCSSRRIRR

SEQ ID NO: 2097 - protein, 20 aa, Artificial Sequence
  Description of Artificial Sequence: Synthetic peptide
  N-term H or Acetyl
  MOD_RES (8)..(8): Modified Cys
  MOD_RES (10)..(10): Thr or Phospho-Thr
  See specification as filed for detailed description of substitutions and preferred embodiments
IANPLMACGTLTRRHQNGRF

SEQ ID NO: 2098 - protein, 10 aa, Artificial Sequence
  Description of Artificial Sequence: Synthetic peptide
  N-term H or Acetyl
  MOD_RES (2)..(2): Modified Cys
  MOD_RES (4)..(4): Ser or Phospho-Ser
  See specification as filed for detailed description of substitutions and preferred embodiments
ICDSLRRKAK

SEQ ID NO: 2099 - protein, 8 aa, Artificial Sequence
  Description of Artificial Sequence: Synthetic peptide
  N-term H or Acetyl
  MOD_RES (2)..(2): Modified Cys
  MOD_RES (4)..(4): Ser or Phospho-Ser
  See specification as filed for detailed description of substitutions and preferred embodiments
ICLSPGPF

SEQ ID NO: 2100 - protein, 16 aa, Artificial Sequence
  Description of Artificial Sequence: Synthetic peptide
  N-term H or Acetyl
  MOD_RES (2)..(2): Modified Cys
  MOD_RES (4)..(4): Ser or Phospho-Ser
  See specification as filed for detailed description of substitutions and preferred embodiments
ICTSPITTTYFFFKKK

SEQ ID NO: 2101 - protein, 16 aa, Artificial Sequence
  Description of Artificial Sequence: Synthetic peptide
  N-term H or Acetyl
  MOD_RES (2)..(2): Modified Cys
  MOD_RES (4)..(4): Thr or Phospho-Thr
  See specification as filed for detailed description of substitutions and preferred embodiments
ICTTPITTTYFFFKKK

SEQ ID NO: 2102 - protein, 12 aa, Artificial Sequence
  Description of Artificial Sequence: Synthetic peptide
  N-term H or Acetyl
  MOD_RES (5)..(5): Modified Cys
  MOD_RES (7)..(7): Ser or Phospho-Ser
  See specification as filed for detailed description of substitutions and preferred embodiments
IDLRCSSRRIRR

SEQ ID NO: 2103 - protein, 15 aa, Artificial Sequence
  Description of Artificial Sequence: Synthetic peptide
  N-term H or Acetyl
  MOD_RES (6)..(6): Modified Cys
  MOD_RES (8)..(8): Thr or Phospho-Thr
  See specification as filed for detailed description of substitutions and preferred embodiments
IDQGDCMTPQFTPYY

SEQ ID NO: 2104 - protein, 15 aa, Artificial Sequence
  Description of Artificial Sequence: Synthetic peptide
  N-term H or Acetyl
  MOD_RES (8)..(8): Thr or Phospho-Thr
  MOD_RES (10)..(10): Modified Cys
  See specification as filed for detailed description of substitutions and preferred embodiments
IDQGDLMTPCFTPYY

SEQ ID NO: 2105 - protein, 12 aa, Artificial Sequence
  Description of Artificial Sequence: Synthetic peptide
  N-term H or Acetyl
  MOD_RES (5)..(5): Modified Cys
  MOD_RES (7)..(7): Ser or Phospho-Ser
  See specification as filed for detailed description of substitutions and preferred embodiments
IELRCSSRRIRR

SEQ ID NO: 2106 - protein, 12 aa, Artificial Sequence
  Description of Artificial Sequence: Synthetic peptide
  N-term H or Acetyl
  MOD_RES (5)..(5): Modified Cys
  MOD_RES (7)..(7): Ser or Phospho-Ser
  See specification as filed for detailed description of substitutions and preferred embodiments
IFLRCSSRRIRR

SEQ ID NO: 2107 - protein, 12 aa, Artificial Sequence
  Description of Artificial Sequence: Synthetic peptide
  N-term H or Acetyl
  MOD_RES (5)..(5): Modified Cys
  MOD_RES (7)..(7): Ser or Phospho-Ser
  See specification as filed for detailed description of substitutions and preferred embodiments
IGLRCSSRRIRR

SEQ ID NO: 2108 - protein, 12 aa, Artificial Sequence
  Description of Artificial Sequence: Synthetic peptide
  N-term H or Acetyl
  MOD_RES (5)..(5): Modified Cys
  MOD_RES (7)..(7): Ser or Phospho-Ser
  See specification as filed for detailed description of substitutions and preferred embodiments
IHLRCSSRRIRR

SEQ ID NO: 2109 - protein, 15 aa, Artificial Sequence
  Description of Artificial Sequence: Synthetic peptide
  N-term H or Acetyl
  MOD_RES (6)..(6): Modified Cys
  MOD_RES (8)..(8): Ser or Phospho-Ser
  See specification as filed for detailed description of substitutions and preferred embodiments
IIHRDCKSNNIFLHE

SEQ ID NO: 2110 - protein, 15 aa, Artificial Sequence
  Description of Artificial Sequence: Synthetic peptide
  N-term H or Acetyl
  MOD_RES (8)..(8): Ser or Phospho-Ser
  MOD_RES (10)..(10): Modified Cys
  See specification as filed for detailed description of substitutions and preferred embodiments
IIHRDLKSNCIFLHE

SEQ ID NO: 2111 - protein, 12 aa, Artificial Sequence
  Description of Artificial Sequence: Synthetic peptide
  N-term H or Acetyl
  MOD_RES (5)..(5): Modified Cys
  MOD_RES (7)..(7): Ser or Phospho-Ser
  See specification as filed for detailed description of substitutions and preferred embodiments
IILRCSSRRIRR

SEQ ID NO: 2112 - protein, 12 aa, Artificial Sequence
  Description of Artificial Sequence: Synthetic peptide
  N-term H or Acetyl
  MOD_RES (5)..(5): Modified Cys
  MOD_RES (7)..(7): Ser or Phospho-Ser
  See specification as filed for detailed description of substitutions and preferred embodiments
IKLRCSSRRIRR

SEQ ID NO: 2113 - protein, 15 aa, Artificial Sequence
  Description of Artificial Sequence: Synthetic peptide
  N-term H or Acetyl
  MOD_RES (8)..(8): Thr or Phospho-Thr
  MOD_RES (10)..(10): Modified Cys
  See specification as filed for detailed description of substitutions and preferred embodiments
IKRPQRATSCVFAMF

SEQ ID NO: 2114 - protein, 12 aa, Artificial Sequence
  Description of Artificial Sequence: Synthetic peptide
  N-term H or Acetyl
  MOD_RES (3)..(3): Leu or Nle (i.e. isomer of Leucine)
  MOD_RES (5)..(5): Modified Cys
  MOD_RES (7)..(7): Ser or Phospho-Ser
  See specification as filed for detailed description of substitutions and preferred embodiments
ILLRCSSRRIRR

SEQ ID NO: 2115 - protein, 12 aa, Artificial Sequence
  Description of Artificial Sequence: Synthetic peptide
  N-term H or Acetyl
  MOD_RES (5)..(5): Modified Cys
  MOD_RES (7)..(7): Ser or Phospho-Ser
  See specification as filed for detailed description of substitutions and preferred embodiments
ILARCSSRRIRR

SEQ ID NO: 2116 - protein, 12 aa, Artificial Sequence
  Description of Artificial Sequence: Synthetic peptide
  N-term H or Acetyl
  MOD_RES (5)..(5): Modified Cys
  MOD_RES (7)..(7): Ser or Phospho-Ser
  See specification as filed for detailed description of substitutions and preferred embodiments
ILDRCSSRRIRR

SEQ ID NO: 2117 - protein, 12 aa, Artificial Sequence
  Description of Artificial Sequence: Synthetic peptide
  N-term H or Acetyl
  MOD_RES (5)..(5): Modified Cys
  MOD_RES (7)..(7): Ser or Phospho-Ser
  See specification as filed for detailed description of substitutions and preferred embodiments
ILERCSSRRIRR

SEQ ID NO: 2118 - protein, 12 aa, Artificial Sequence
  Description of Artificial Sequence: Synthetic peptide
  N-term H or Acetyl
  MOD_RES (5)..(5): Modified Cys
  MOD_RES (7)..(7): Ser or Phospho-Ser
  See specification as filed for detailed description of substitutions and preferred embodiments
ILFRCSSRRIRR

SEQ ID NO: 2119 - protein, 12 aa, Artificial Sequence
  Description of Artificial Sequence: Synthetic peptide
  N-term H or Acetyl
  MOD_RES (5)..(5): Modified Cys
  MOD_RES (7)..(7): Ser or Phospho-Ser
  See specification as filed for detailed description of substitutions and preferred embodiments
ILGRCSSRRIRR

SEQ ID NO: 2120 - protein, 12 aa, Artificial Sequence
  Description of Artificial Sequence: Synthetic peptide
  N-term H or Acetyl
  MOD_RES (5)..(5): Modified Cys
  MOD_RES (7)..(7): Ser or Phospho-Ser
  See specification as filed for detailed description of substitutions and preferred embodiments
ILHRCSSRRIRR

SEQ ID NO: 2121 - protein, 12 aa, Artificial Sequence
  Description of Artificial Sequence: Synthetic peptide
  N-term H or Acetyl
  MOD_RES (5)..(5): Modified Cys
  MOD_RES (7)..(7): Ser or Phospho-Ser
  See specification as filed for detailed description of substitutions and preferred embodiments
ILIRCSSRRIRR

SEQ ID NO: 2122 - protein, 12 aa, Artificial Sequence
  Description of Artificial Sequence: Synthetic peptide
  N-term H or Acetyl
  MOD_RES (5)..(5): Modified Cys
  MOD_RES (7)..(7): Ser or Phospho-Ser
  See specification as filed for detailed description of substitutions and preferred embodiments
ILKRCSSRRIRR

SEQ ID NO: 2123 - protein, 12 aa, Artificial Sequence
  Description of Artificial Sequence: Synthetic peptide
  N-term H or Acetyl
  MOD_RES (4)..(4): Leu or Nle (i.e. isomer of Leucine)
  MOD_RES (5)..(5): Modified Cys
  MOD_RES (7)..(7): Ser or Phospho-Ser
  See specification as filed for detailed description of substitutions and preferred embodiments
ILLLCSSRRIRR

SEQ ID NO: 2124 - protein, 23 aa, Artificial Sequence
  Description of Artificial Sequence: Synthetic peptide
  N-term H or Acetyl
  MOD_RES (4)..(4): Leu or Nle (i.e. isomer of Leucine)
  MOD_RES (7)..(7): Ser or Phospho-Ser
  MOD_RES (9)..(9): Modified Cys
  See specification as filed for detailed description of substitutions and preferred embodiments
ILLLESSRCRIRSGNKLGRIGRN

SEQ ID NO: 2125 - protein, 19 aa, Artificial Sequence
  Description of Artificial Sequence: Synthetic peptide
  N-term H or Acetyl
  MOD_RES (4)..(4): Ser or Phospho-Ser
  MOD_RES (7)..(7): Ser or Phospho-Ser
  MOD_RES (9)..(9): Modified Cys
  See specification as filed for detailed description of substitutions and preferred embodiments
ILLSESSRCRIRSGNKLGR

SEQ ID NO: 2126 - protein, 12 aa, Artificial Sequence
  Description of Artificial Sequence: Synthetic peptide
  N-term H or Acetyl
  MOD_RES (5)..(5): Modified Cys
  MOD_RES (7)..(7): Ser or Phospho-Ser
  See specification as filed for detailed description of substitutions and preferred embodiments
ILLACSSRRIRR

SEQ ID NO: 2127 - protein, 23 aa, Artificial Sequence
  Description of Artificial Sequence: Synthetic peptide
  N-term H or Acetyl
  MOD_RES (7)..(7): Ser or Phospho-Ser
  MOD_RES (9)..(9): Modified Cys
  See specification as filed for detailed description of substitutions and preferred embodiments
ILLAESSRCRIRSGNKLGRIGRN

SEQ ID NO: 2128 - protein, 12 aa, Artificial Sequence
  Description of Artificial Sequence: Synthetic peptide
  N-term H or Acetyl
  MOD_RES (5)..(5): Modified Cys
  MOD_RES (7)..(7): Ser or Phospho-Ser
  See specification as filed for detailed description of substitutions and preferred embodiments
ILLDCSSRRIRR

SEQ ID NO: 2129 - protein, 23 aa, Artificial Sequence
  Description of Artificial Sequence: Synthetic peptide
  N-term H or Acetyl
  MOD_RES (7)..(7): Ser or Phospho-Ser
  MOD_RES (9)..(9): Modified Cys
  See specification as filed for detailed description of substitutions and preferred embodiments
ILLDESSRCRIRSGNKLGRIGRN

SEQ ID NO: 2130 - protein, 12 aa, Artificial Sequence
  Description of Artificial Sequence: Synthetic peptide
  N-term H or Acetyl
  MOD_RES (5)..(5): Modified Cys
  MOD_RES (7)..(7): Ser or Phospho-Ser
  See specification as filed for detailed description of substitutions and preferred embodiments
ILLECSSRRIRR

SEQ ID NO: 2131 - protein, 23 aa, Artificial Sequence
  Description of Artificial Sequence: Synthetic peptide
  N-term H or Acetyl
  MOD_RES (7)..(7): Ser or Phospho-Ser
  MOD_RES (9)..(9): Modified Cys
  See specification as filed for detailed description of substitutions and preferred embodiments
ILLEESSRCRIRSGNKLGRIGRN

SEQ ID NO: 2132 - protein, 12 aa, Artificial Sequence
  Description of Artificial Sequence: Synthetic peptide
  N-term H or Acetyl
  MOD_RES (5)..(5): Modified Cys
  MOD_RES (7)..(7): Ser or Phospho-Ser
  See specification as filed for detailed description of substitutions and preferred embodiments
ILLFCSSRRIRR

SEQ ID NO: 2133 - protein, 23 aa, Artificial Sequence
  Description of Artificial Sequence: Synthetic peptide
  N-term H or Acetyl
  MOD_RES (7)..(7): Ser or Phospho-Ser
  MOD_RES (9)..(9): Modified Cys
  See specification as filed for detailed description of substitutions and preferred embodiments
ILLFESSRCRIRSGNKLGRIGRN

SEQ ID NO: 2134 - protein, 12 aa, Artificial Sequence
  Description of Artificial Sequence: Synthetic peptide
  N-term H or Acetyl
  MOD_RES (5)..(5): Modified Cys
  MOD_RES (7)..(7): Ser or Phospho-Ser
  See specification as filed for detailed description of substitutions and preferred embodiments
ILLGCSSRRIRR

SEQ ID NO: 2135 - protein, 23 aa, Artificial Sequence
  Description of Artificial Sequence: Synthetic peptide
  N-term H or Acetyl
  MOD_RES (7)..(7): Ser or Phospho-Ser
  MOD_RES (9)..(9): Modified Cys
  See specification as filed for detailed description of substitutions and preferred embodiments
ILLGESSRCRIRSGNKLGRIGRN

SEQ ID NO: 2136 - protein, 12 aa, Artificial Sequence
  Description of Artificial Sequence: Synthetic peptide
  N-term H or Acetyl
  MOD_RES (5)..(5): Modified Cys
  MOD_RES (7)..(7): Ser or Phospho-Ser
  See specification as filed for detailed description of substitutions and preferred embodiments
ILLHCSSRRIRR

SEQ ID NO: 2137 - protein, 23 aa, Artificial Sequence
  Description of Artificial Sequence: Synthetic peptide
  N-term H or Acetyl
  MOD_RES (7)..(7): Ser or Phospho-Ser
  MOD_RES (9)..(9): Modified Cys
  See specification as filed for detailed description of substitutions and preferred embodiments
ILLHESSRCRIRSGNKLGRIGRN

SEQ ID NO: 2138 - protein, 12 aa, Artificial Sequence
  Description of Artificial Sequence: Synthetic peptide
  N-term H or Acetyl
  MOD_RES (5)..(5): Modified Cys
  MOD_RES (7)..(7): Ser or Phospho-Ser
  See specification as filed for detailed description of substitutions and preferred embodiments
ILLICSSRRIRR

SEQ ID NO: 2139 - protein, 23 aa, Artificial Sequence
  Description of Artificial Sequence: Synthetic peptide
  N-term H or Acetyl
  MOD_RES (7)..(7): Ser or Phospho-Ser
  MOD_RES (9)..(9): Modified Cys
  See specification as filed for detailed description of substitutions and preferred embodiments
ILLIESSRCRIRSGNKLGRIGRN

SEQ ID NO: 2140 - protein, 12 aa, Artificial Sequence
  Description of Artificial Sequence: Synthetic peptide
  N-term H or Acetyl
  MOD_RES (5)..(5): Modified Cys
  MOD_RES (7)..(7): Ser or Phospho-Ser
  See specification as filed for detailed description of substitutions and preferred embodiments
ILLKCSSRRIRR

SEQ ID NO: 2141 - protein, 23 aa, Artificial Sequence
  Description of Artificial Sequence: Synthetic peptide
  N-term H or Acetyl
  MOD_RES (7)..(7): Ser or Phospho-Ser
  MOD_RES (9)..(9): Modified Cys
  See specification as filed for detailed description of substitutions and preferred embodiments
ILLKESSRCRIRSGNKLGRIGRN

SEQ ID NO: 2142 - protein, 12 aa, Artificial Sequence
  Description of Artificial Sequence: Synthetic peptide
  N-term H or Acetyl
  MOD_RES (5)..(5): Modified Cys
  MOD_RES (7)..(7): Ser or Phospho-Ser
  See specification as filed for detailed description of substitutions and preferred embodiments
ILLLCSSRRIRR

SEQ ID NO: 2143 - protein, 23 aa, Artificial Sequence
  Description of Artificial Sequence: Synthetic peptide
  N-term H or Acetyl
  MOD_RES (7)..(7): Ser or Phospho-Ser
  MOD_RES (9)..(9): Modified Cys
  See specification as filed for detailed description of substitutions and preferred embodiments
ILLLESSRCRIRSGNKLGRIGRN

SEQ ID NO: 2144 - protein, 12 aa, Artificial Sequence
  Description of Artificial Sequence: Synthetic peptide
  N-term H or Acetyl
  MOD_RES (5)..(5): Modified Cys
  MOD_RES (7)..(7): Ser or Phospho-Ser
  See specification as filed for detailed description of substitutions and preferred embodiments
ILLNCSSRRIRR

SEQ ID NO: 2145 - protein, 23 aa, Artificial Sequence
  Description of Artificial Sequence: Synthetic peptide
  N-term H or Acetyl
  MOD_RES (7)..(7): Ser or Phospho-Ser
  MOD_RES (9)..(9): Modified Cys
  See specification as filed for detailed description of substitutions and preferred embodiments
ILLNESSRCRIRSGNKLGRIGRN

SEQ ID NO: 2146 - protein, 12 aa, Artificial Sequence
  Description of Artificial Sequence: Synthetic peptide
  N-term H or Acetyl
  MOD_RES (5)..(5): Modified Cys
  MOD_RES (7)..(7): Ser or Phospho-Ser
  See specification as filed for detailed description of substitutions and preferred embodiments
ILLPCSSRRIRR

SEQ ID NO: 2147 - protein, 23 aa, Artificial Sequence
  Description of Artificial Sequence: Synthetic peptide
  N-term H or Acetyl
  MOD_RES (7)..(7): Ser or Phospho-Ser
  MOD_RES (9)..(9): Modified Cys
  See specification as filed for detailed description of substitutions and preferred embodiments
ILLPESSRCRIRSGNKLGRIGRN

SEQ ID NO: 2148 - protein, 12 aa, Artificial Sequence
  Description of Artificial Sequence: Synthetic peptide
  N-term H or Acetyl
  MOD_RES (5)..(5): Modified Cys
  MOD_RES (7)..(7): Ser or Phospho-Ser
  See specification as filed for detailed description of substitutions and preferred embodiments
ILLQCSSRRIRR

SEQ ID NO: 2149 - protein, 23 aa, Artificial Sequence
  Description of Artificial Sequence: Synthetic peptide
  N-term H or Acetyl
  MOD_RES (7)..(7): Ser or Phospho-Ser
  MOD_RES (9)..(9): Modified Cys
  See specification as filed for detailed description of substitutions and preferred embodiments
ILLQESSRCRIRSGNKLGRIGRN

SEQ ID NO: 2150 - protein, 12 aa, Artificial Sequence
  Description of Artificial Sequence: Synthetic peptide
  N-term H or Acetyl
  MOD_RES (5)..(5): Modified Cys
  MOD_RES (6)..(6): Leu or Nle (i.e. isomer of Leucine)
  MOD_RES (7)..(7): Ser or Phospho-Ser
  See specification as filed for detailed description of substitutions and preferred embodiments
ILLRCLSRRIRR

SEQ ID NO: 2151 - protein, 12 aa, Artificial Sequence
  Description of Artificial Sequence: Synthetic peptide
  N-term H or Acetyl
  MOD_RES (5)..(5): Modified Cys
  MOD_RES (7)..(7): Ser or Phospho-Ser
  See specification as filed for detailed description of substitutions and preferred embodiments
ILLRCASRRIRR

SEQ ID NO: 2152 - protein, 12 aa, Artificial Sequence
  Description of Artificial Sequence: Synthetic peptide
  N-term H or Acetyl
  MOD_RES (5)..(5): Modified Cys
  MOD_RES (7)..(7): Ser or Phospho-Ser
  See specification as filed for detailed description of substitutions and preferred embodiments
ILLRCDSRRIRR

SEQ ID NO: 2153 - protein, 12 aa, Artificial Sequence
  Description of Artificial Sequence: Synthetic peptide
  N-term H or Acetyl
  MOD_RES (5)..(5): Modified Cys
  MOD_RES (7)..(7): Ser or Phospho-Ser
  See specification as filed for detailed description of substitutions and preferred embodiments
ILLRCESRRIRR

SEQ ID NO: 2154 - protein, 12 aa, Artificial Sequence
  Description of Artificial Sequence: Synthetic peptide
  N-term H or Acetyl
  MOD_RES (5)..(5): Modified Cys
  MOD_RES (7)..(7): Ser or Phospho-Ser
  See specification as filed for detailed description of substitutions and preferred embodiments
ILLRCFSRRIRR

SEQ ID NO: 2155 - protein, 12 aa, Artificial Sequence
  Description of Artificial Sequence: Synthetic peptide
  N-term H or Acetyl
  MOD_RES (5)..(5): Modified Cys
  MOD_RES (7)..(7): Ser or Phospho-Ser
  See specification as filed for detailed description of substitutions and preferred embodiments
ILLRCGSRRIRR

SEQ ID NO: 2156 - protein, 12 aa, Artificial Sequence
  Description of Artificial Sequence: Synthetic peptide
  N-term H or Acetyl
  MOD_RES (5)..(5): Modified Cys
  MOD_RES (7)..(7): Ser or Phospho-Ser
  See specification as filed for detailed description of substitutions and preferred embodiments
ILLRCHSRRIRR

SEQ ID NO: 2157 - protein, 12 aa, Artificial Sequence
  Description of Artificial Sequence: Synthetic peptide
  N-term H or Acetyl
  MOD_RES (5)..(5): Modified Cys
  MOD_RES (7)..(7): Ser or Phospho-Ser
  See specification as filed for detailed description of substitutions and preferred embodiments
ILLRCISRRIRR

SEQ ID NO: 2158 - protein, 12 aa, Artificial Sequence
  Description of Artificial Sequence: Synthetic peptide
  N-term H or Acetyl
  MOD_RES (5)..(5): Modified Cys
  MOD_RES (7)..(7): Ser or Phospho-Ser
  See specification as filed for detailed description of substitutions and preferred embodiments
ILLRCKSRRIRR

SEQ ID NO: 2159 - protein, 12 aa, Artificial Sequence
  Description of Artificial Sequence: Synthetic peptide
  N-term H or Acetyl
  MOD_RES (5)..(5): Modified Cys
  MOD_RES (7)..(7): Ser or Phospho-Ser
  See specification as filed for detailed description of substitutions and preferred embodiments
ILLRCLSRRIRR

SEQ ID NO: 2160 - protein, 12 aa, Artificial Sequence
  Description of Artificial Sequence: Synthetic peptide
  N-term H or Acetyl
  MOD_RES (5)..(5): Modified Cys
  MOD_RES (7)..(7): Ser or Phospho-Ser
  See specification as filed for detailed description of substitutions and preferred embodiments
ILLRCNSRRIRR

SEQ ID NO: 2161 - protein, 12 aa, Artificial Sequence
  Description of Artificial Sequence: Synthetic peptide
  N-term H or Acetyl
  MOD_RES (5)..(5): Modified Cys
  MOD_RES (7)..(7): Ser or Phospho-Ser
  See specification as filed for detailed description of substitutions and preferred embodiments
ILLRCPSRRIRR

SEQ ID NO: 2162 - protein, 12 aa, Artificial Sequence
  Description of Artificial Sequence: Synthetic peptide
  N-term H or Acetyl
  MOD_RES (5)..(5): Modified Cys
  MOD_RES (7)..(7): Ser or Phospho-Ser
  See specification as filed for detailed description of substitutions and preferred embodiments
ILLRCQSRRIRR

SEQ ID NO: 2163 - protein, 12 aa, Artificial Sequence
  Description of Artificial Sequence: Synthetic peptide
  N-term H or Acetyl
  MOD_RES (5)..(5): Modified Cys
  MOD_RES (7)..(7): Ser or Phospho-Ser
  See specification as filed for detailed description of substitutions and preferred embodiments
ILLRCRSRRIRR

SEQ ID NO: 2164 - protein, 12 aa, Artificial Sequence
  Description of Artificial Sequence: Synthetic peptide
  N-term H or Acetyl
  MOD_RES (5)..(5): Modified Cys
  MOD_RES (7)..(7): Ser or Phospho-Ser
  MOD_RES (8)..(8): Leu or Nle (i.e. isomer of Leucine)
  See specification as filed for detailed description of substitutions and preferred embodiments
ILLRCSSLRIRR

SEQ ID NO: 2165 - protein, 12 aa, Artificial Sequence
  Description of Artificial Sequence: Synthetic peptide
  N-term H or Acetyl
  MOD_RES (5)..(5): Modified Cys
  MOD_RES (7)..(7): Ser or Phospho-Ser
  See specification as filed for detailed description of substitutions and preferred embodiments
ILLRCSSARIRR

SEQ ID NO: 2166 - protein, 12 aa, Artificial Sequence
  Description of Artificial Sequence: Synthetic peptide
  N-term H or Acetyl
  MOD_RES (5)..(5): Modified Cys
  MOD_RES (7)..(7): Ser or Phospho-Ser
  See specification as filed for detailed description of substitutions and preferred embodiments
ILLRCSSDRIRR

SEQ ID NO: 2167 - protein, 12 aa, Artificial Sequence
  Description of Artificial Sequence: Synthetic peptide
  N-term H or Acetyl
  MOD_RES (5)..(5): Modified Cys
  MOD_RES (7)..(7): Ser or Phospho-Ser
  See specification as filed for detailed description of substitutions and preferred embodiments
ILLRCSSERIRR

SEQ ID NO: 2168 - protein, 12 aa, Artificial Sequence
  Description of Artificial Sequence: Synthetic peptide
  N-term H or Acetyl
  MOD_RES (5)..(5): Modified Cys
  MOD_RES (7)..(7): Ser or Phospho-Ser
  See specification as filed for detailed description of substitutions and preferred embodiments
ILLRCSSFRIRR

SEQ ID NO: 2169 - protein, 12 aa, Artificial Sequence
  Description of Artificial Sequence: Synthetic peptide
  N-term H or Acetyl
  MOD_RES (5)..(5): Modified Cys
  MOD_RES (7)..(7): Ser or Phospho-Ser
  See specification as filed for detailed description of substitutions and preferred embodiments
ILLRCSSGRIRR

SEQ ID NO: 2170 - protein, 12 aa, Artificial Sequence
  Description of Artificial Sequence: Synthetic peptide
  N-term H or Acetyl
  MOD_RES (5)..(5): Modified Cys
  MOD_RES (7)..(7): Ser or Phospho-Ser
  See specification as filed for detailed description of substitutions and preferred embodiments
ILLRCSSHRIRR

SEQ ID NO: 2171 - protein, 12 aa, Artificial Sequence
  Description of Artificial Sequence: Synthetic peptide
  N-term H or Acetyl
  MOD_RES (5)..(5): Modified Cys
  MOD_RES (7)..(7): Ser or Phospho-Ser
  See specification as filed for detailed description of substitutions and preferred embodiments
ILLRCSSIRIRR

SEQ ID NO: 2172 - protein, 12 aa, Artificial Sequence
  Description of Artificial Sequence: Synthetic peptide
  N-term H or Acetyl
  MOD_RES (5)..(5): Modified Cys
  MOD_RES (7)..(7): Ser or Phospho-Ser
  See specification as filed for detailed description of substitutions and preferred embodiments
ILLRCSSKRIRR

SEQ ID NO: 2173 - protein, 12 aa, Artificial Sequence
  Description of Artificial Sequence: Synthetic peptide
  N-term H or Acetyl
  MOD_RES (5)..(5): Modified Cys
  MOD_RES (7)..(7): Ser or Phospho-Ser
  See specification as filed for detailed description of substitutions and preferred embodiments
ILLRCSSLRIRR

SEQ ID NO: 2174 - protein, 12 aa, Artificial Sequence
  Description of Artificial Sequence: Synthetic peptide
  N-term H or Acetyl
  MOD_RES (5)..(5): Modified Cys
  MOD_RES (7)..(7): Ser or Phospho-Ser
  See specification as filed for detailed description of substitutions and preferred embodiments
ILLRCSSNRIRR

SEQ ID NO: 2175 - protein, 12 aa, Artificial Sequence
  Description of Artificial Sequence: Synthetic peptide
  N-term H or Acetyl
  MOD_RES (5)..(5): Modified Cys
  MOD_RES (7)..(7): Ser or Phospho-Ser
  See specification as filed for detailed description of substitutions and preferred embodiments
ILLRCSSPRIRR

SEQ ID NO: 2176 - protein, 12 aa, Artificial Sequence
  Description of Artificial Sequence: Synthetic peptide
  N-term H or Acetyl
  MOD_RES (5)..(5): Modified Cys
  MOD_RES (7)..(7): Ser or Phospho-Ser
  See specification as filed for detailed description of substitutions and preferred embodiments
ILLRCSSQRIRR

SEQ ID NO: 2177 - protein, 12 aa, Artificial Sequence
  Description of Artificial Sequence: Synthetic peptide
  N-term H or Acetyl
  MOD_RES (5)..(5): Modified Cys
  MOD_RES (7)..(7): Ser or Phospho-Ser
  MOD_RES (9)..(9): Leu or Nle (i.e. isomer of Leucine)
  See specification as filed for detailed description of substitutions and preferred embodiments
ILLRCSSRLIRR

SEQ ID NO: 2178 - protein, 12 aa, Artificial Sequence
  Description of Artificial Sequence: Synthetic peptide
  N-term H or Acetyl
  MOD_RES (5)..(5): Modified Cys
  MOD_RES (7)..(7): Ser or Phospho-Ser
  See specification as filed for detailed description of substitutions and preferred embodiments
ILLRCSSRAIRR

SEQ ID NO: 2179 - protein, 12 aa, Artificial Sequence
  Description of Artificial Sequence: Synthetic peptide
  N-term H or Acetyl
  MOD_RES (5)..(5): Modified Cys
  MOD_RES (7)..(7): Ser or Phospho-Ser
  See specification as filed for detailed description of substitutions and preferred embodiments
ILLRCSSRDIRR

SEQ ID NO: 2180 - protein, 12 aa, Artificial Sequence
  Description of Artificial Sequence: Synthetic peptide
  N-term H or Acetyl
  MOD_RES (5)..(5): Modified Cys
  MOD_RES (7)..(7): Ser or Phospho-Ser
  See specification as filed for detailed description of substitutions and preferred embodiments
ILLRCSSREIRR

SEQ ID NO: 2181 - protein, 12 aa, Artificial Sequence
  Description of Artificial Sequence: Synthetic peptide
  N-term H or Acetyl
  MOD_RES (5)..(5): Modified Cys
  MOD_RES (7)..(7): Ser or Phospho-Ser
  See specification as filed for detailed description of substitutions and preferred embodiments
ILLRCSSRFIRR

SEQ ID NO: 2182 - protein, 12 aa, Artificial Sequence
  Description of Artificial Sequence: Synthetic peptide
  N-term H or Acetyl
  MOD_RES (5)..(5): Modified Cys
  MOD_RES (7)..(7): Ser or Phospho-Ser
  See specification as filed for detailed description of substitutions and preferred embodiments
ILLRCSSRGIRR

SEQ ID NO: 2183 - protein, 12 aa, Artificial Sequence
  Description of Artificial Sequence: Synthetic peptide
  N-term H or Acetyl
  MOD_RES (5)..(5): Modified Cys
  MOD_RES (7)..(7): Ser or Phospho-Ser
  See specification as filed for detailed description of substitutions and preferred embodiments
ILLRCSSRHIRR

SEQ ID NO: 2184 - protein, 12 aa, Artificial Sequence
  Description of Artificial Sequence: Synthetic peptide
  N-term H or Acetyl
  MOD_RES (5)..(5): Modified Cys
  MOD_RES (7)..(7): Ser or Phospho-Ser
  See specification as filed for detailed description of substitutions and preferred embodiments
ILLRCSSRIIRR

SEQ ID NO: 2185 - protein, 12 aa, Artificial Sequence
  Description of Artificial Sequence: Synthetic peptide
  N-term H or Acetyl
  MOD_RES (5)..(5): Modified Cys
  MOD_RES (7)..(7): Ser or Phospho-Ser
  See specification as filed for detailed description of substitutions and preferred embodiments
ILLRCSSRKIRR

SEQ ID NO: 2186 - protein, 12 aa, Artificial Sequence
  Description of Artificial Sequence: Synthetic peptide
  N-term H or Acetyl
  MOD_RES (5)..(5): Modified Cys
  MOD_RES (7)..(7): Ser or Phospho-Ser
  See specification as filed for detailed description of substitutions and preferred embodiments
ILLRCSSRLIRR

SEQ ID NO: 2187 - protein, 12 aa, Artificial Sequence
  Description of Artificial Sequence: Synthetic peptide
  N-term H or Acetyl
  MOD_RES (5)..(5): Modified Cys
  MOD_RES (7)..(7): Ser or Phospho-Ser
  See specification as filed for detailed description of substitutions and preferred embodiments
ILLRCSSRNIRR

SEQ ID NO: 2188 - protein, 12 aa, Artificial Sequence
  Description of Artificial Sequence: Synthetic peptide
  N-term H or Acetyl
  MOD_RES (5)..(5): Modified Cys
  MOD_RES (7)..(7): Ser or Phospho-Ser
  See specification as filed for detailed description of substitutions and preferred embodiments
ILLRCSSRPIRR

SEQ ID NO: 2189 - protein, 12 aa, Artificial Sequence
  Description of Artificial Sequence: Synthetic peptide
  N-term H or Acetyl
  MOD_RES (5)..(5): Modified Cys
  MOD_RES (7)..(7): Ser or Phospho-Ser
  See specification as filed for detailed description of substitutions and preferred embodiments
ILLRCSSRQIRR

SEQ ID NO: 2190 - protein, 12 aa, Artificial Sequence
  Description of Artificial Sequence: Synthetic peptide
  N-term H or Acetyl
  MOD_RES (5)..(5): Modified Cys
  MOD_RES (7)..(7): Ser or Phospho-Ser
  MOD_RES (10)..(10): Leu or Nle (i.e. isomer of Leucine)
  See specification as filed for detailed description of substitutions and preferred embodiments
ILLRCSSRRLRR

SEQ ID NO: 2191 - protein, 12 aa, Artificial Sequence
  Description of Artificial Sequence: Synthetic peptide
  N-term H or Acetyl
  MOD_RES (5)..(5): Modified Cys
  MOD_RES (7)..(7): Ser or Phospho-Ser
  See specification as filed for detailed description of substitutions and preferred embodiments
ILLRCSSRRARR

SEQ ID NO: 2192 - protein, 12 aa, Artificial Sequence
  Description of Artificial Sequence: Synthetic peptide
  N-term H or Acetyl
  MOD_RES (5)..(5): Modified Cys
  MOD_RES (7)..(7): Ser or Phospho-Ser
  See specification as filed for detailed description of substitutions and preferred embodiments
ILLRCSSRRDRR

SEQ ID NO: 2193 - protein, 12 aa, Artificial Sequence
  Description of Artificial Sequence: Synthetic peptide
  N-term H or Acetyl
  MOD_RES (5)..(5): Modified Cys
  MOD_RES (7)..(7): Ser or Phospho-Ser
  See specification as filed for detailed description of substitutions and preferred embodiments
ILLRCSSRRERR

SEQ ID NO: 2194 - protein, 12 aa, Artificial Sequence
  Description of Artificial Sequence: Synthetic peptide
  N-term H or Acetyl
  MOD_RES (5)..(5): Modified Cys
  MOD_RES (7)..(7): Ser or Phospho-Ser
  See specification as filed for detailed description of substitutions and preferred embodiments
ILLRCSSRRFRR

SEQ ID NO: 2195 - protein, 12 aa, Artificial Sequence
  Description of Artificial Sequence: Synthetic peptide
  N-term H or Acetyl
  MOD_RES (5)..(5): Modified Cys
  MOD_RES (7)..(7): Ser or Phospho-Ser
  See specification as filed for detailed description of substitutions and preferred embodiments
ILLRCSSRRGRR

SEQ ID NO: 2196 - protein, 12 aa, Artificial Sequence
  Description of Artificial Sequence: Synthetic peptide
  N-term H or Acetyl
  MOD_RES (5)..(5): Modified Cys
  MOD_RES (7)..(7): Ser or Phospho-Ser
  See specification as filed for detailed description of substitutions and preferred embodiments
ILLRCSSRRHRR

SEQ ID NO: 2197 - protein, 12 aa, Artificial Sequence
  Description of Artificial Sequence: Synthetic peptide
  N-term H or Acetyl
  MOD_RES (5)..(5): Modified Cys
  MOD_RES (7)..(7): Ser or Phospho-Ser
  MOD_RES (11)..(11): Leu or Nle (i.e. isomer of Leucine)
  See specification as filed for detailed description of substitutions and preferred embodiments
ILLRCSSRRILR

SEQ ID NO: 2198 - protein, 12 aa, Artificial Sequence
  Description of Artificial Sequence: Synthetic peptide
  N-term H or Acetyl
  MOD_RES (5)..(5): Modified Cys
  MOD_RES (7)..(7): Ser or Phospho-Ser
  See specification as filed for detailed description of substitutions and preferred embodiments
ILLRCSSRRIAR

SEQ ID NO: 2199 - protein, 12 aa, Artificial Sequence
  Description of Artificial Sequence: Synthetic peptide
  N-term H or Acetyl
  MOD_RES (5)..(5): Modified Cys
  MOD_RES (7)..(7): Ser or Phospho-Ser
  See specification as filed for detailed description of substitutions and preferred embodiments
ILLRCSSRRIDR

SEQ ID NO: 2200 - protein, 12 aa, Artificial Sequence
  Description of Artificial Sequence: Synthetic peptide
  N-term H or Acetyl
  MOD_RES (5)..(5): Modified Cys
  MOD_RES (7)..(7): Ser or Phospho-Ser
  See specification as filed for detailed description of substitutions and preferred embodiments
ILLRCSSRRIER

SEQ ID NO: 2201 - protein, 12 aa, Artificial Sequence
  Description of Artificial Sequence: Synthetic peptide
  N-term H or Acetyl
  MOD_RES (5)..(5): Modified Cys
  MOD_RES (7)..(7): Ser or Phospho-Ser
  See specification as filed for detailed description of substitutions and preferred embodiments
ILLRCSSRRIFR

SEQ ID NO: 2202 - protein, 12 aa, Artificial Sequence
  Description of Artificial Sequence: Synthetic peptide
  N-term H or Acetyl
  MOD_RES (5)..(5): Modified Cys
  MOD_RES (7)..(7): Ser or Phospho-Ser
  See specification as filed for detailed description of substitutions and preferred embodiments
ILLRCSSRRIGR

SEQ ID NO: 2203 - protein, 12 aa, Artificial Sequence
  Description of Artificial Sequence: Synthetic peptide
  N-term H or Acetyl
  MOD_RES (5)..(5): Modified Cys
  MOD_RES (7)..(7): Ser or Phospho-Ser
  See specification as filed for detailed description of substitutions and preferred embodiments
ILLRCSSRRIHR

SEQ ID NO: 2204 - protein, 12 aa, Artificial Sequence
  Description of Artificial Sequence: Synthetic peptide
  N-term H or Acetyl
  MOD_RES (5)..(5): Modified Cys
  MOD_RES (7)..(7): Ser or Phospho-Ser
  See specification as filed for detailed description of substitutions and preferred embodiments
ILLRCSSRRIIR

SEQ ID NO: 2205 - protein, 12 aa, Artificial Sequence
  Description of Artificial Sequence: Synthetic peptide
  N-term H or Acetyl
  MOD_RES (5)..(5): Modified Cys
  MOD_RES (7)..(7): Ser or Phospho-Ser
  See specification as filed for detailed description of substitutions and preferred embodiments
ILLRCSSRRIKR

SEQ ID NO: 2206 - protein, 12 aa, Artificial Sequence
  Description of Artificial Sequence: Synthetic peptide
  N-term H or Acetyl
  MOD_RES (5)..(5): Modified Cys
  MOD_RES (7)..(7): Ser or Phospho-Ser
  See specification as filed for detailed description of substitutions and preferred embodiments
ILLRCSSRRILR

SEQ ID NO: 2207 - protein, 12 aa, Artificial Sequence
  Description of Artificial Sequence: Synthetic peptide
  N-term H or Acetyl
  MOD_RES (5)..(5): Modified Cys
  MOD_RES (7)..(7): Ser or Phospho-Ser
  See specification as filed for detailed description of substitutions and preferred embodiments
ILLRCSSRRINR

SEQ ID NO: 2208 - protein, 12 aa, Artificial Sequence
  Description of Artificial Sequence: Synthetic peptide
  N-term H or Acetyl
  MOD_RES (5)..(5): Modified Cys
  MOD_RES (7)..(7): Ser or Phospho-Ser
  See specification as filed for detailed description of substitutions and preferred embodiments
ILLRCSSRRIPR

SEQ ID NO: 2209 - protein, 12 aa, Artificial Sequence
  Description of Artificial Sequence: Synthetic peptide
  N-term H or Acetyl
  MOD_RES (5)..(5): Modified Cys
  MOD_RES (7)..(7): Ser or Phospho-Ser
  See specification as filed for detailed description of substitutions and preferred embodiments
ILLRCSSRRIQR

SEQ ID NO: 2210 - protein, 12 aa, Artificial Sequence
  Description of Artificial Sequence: Synthetic peptide
  N-term H or Acetyl
  MOD_RES (5)..(5): Modified Cys
  MOD_RES (7)..(7): Ser or Phospho-Ser
  MOD_RES (12)..(12): Leu or Nle (i.e. isomer of Leucine)
  See specification as filed for detailed description of substitutions and preferred embodiments
ILLRCSSRRIRL

SEQ ID NO: 2211 - protein, 12 aa, Artificial Sequence
  Description of Artificial Sequence: Synthetic peptide
  N-term H or Acetyl
  MOD_RES (5)..(5): Modified Cys
  MOD_RES (7)..(7): Ser or Phospho-Ser
  See specification as filed for detailed description of substitutions and preferred embodiments
ILLRCSSRRIRA

SEQ ID NO: 2212 - protein, 12 aa, Artificial Sequence
  Description of Artificial Sequence: Synthetic peptide
  N-term H or Acetyl
  MOD_RES (5)..(5): Modified Cys
  MOD_RES (7)..(7): Ser or Phospho-Ser
  See specification as filed for detailed description of substitutions and preferred embodiments
ILLRCSSRRIRD

SEQ ID NO: 2213 - protein, 12 aa, Artificial Sequence
  Description of Artificial Sequence: Synthetic peptide
  N-term H or Acetyl
  MOD_RES (5)..(5): Modified Cys
  MOD_RES (7)..(7): Ser or Phospho-Ser
  See specification as filed for detailed description of substitutions and preferred embodiments
ILLRCSSRRIRE

SEQ ID NO: 2214 - protein, 12 aa, Artificial Sequence
  Description of Artificial Sequence: Synthetic peptide
  N-term H or Acetyl
  MOD_RES (5)..(5): Modified Cys
  MOD_RES (7)..(7): Ser or Phospho-Ser
  See specification as filed for detailed description of substitutions and preferred embodiments
ILLRCSSRRIRF

SEQ ID NO: 2215 - protein, 12 aa, Artificial Sequence
  Description of Artificial Sequence: Synthetic peptide
  N-term H or Acetyl
  MOD_RES (5)..(5): Modified Cys
  MOD_RES (7)..(7): Ser or Phospho-Ser
  See specification as filed for detailed description of substitutions and preferred embodiments
ILLRCSSRRIRG

SEQ ID NO: 2216 - protein, 12 aa, Artificial Sequence
  Description of Artificial Sequence: Synthetic peptide
  N-term H or Acetyl
  MOD_RES (5)..(5): Modified Cys
  MOD_RES (7)..(7): Ser or Phospho-Ser
  See specification as filed for detailed description of substitutions and preferred embodiments
ILLRCSSRRIRH

SEQ ID NO: 2217 - protein, 12 aa, Artificial Sequence
  Description of Artificial Sequence: Synthetic peptide
  N-term H or Acetyl
  MOD_RES (5)..(5): Modified Cys
  MOD_RES (7)..(7): Ser or Phospho-Ser
  See specification as filed for detailed description of substitutions and preferred embodiments
ILLRCSSRRIRI

SEQ ID NO: 2218 - protein, 12 aa, Artificial Sequence
  Description of Artificial Sequence: Synthetic peptide
  N-term H or Acetyl
  MOD_RES (5)..(5): Modified Cys
  MOD_RES (7)..(7): Ser or Phospho-Ser
  See specification as filed for detailed description of substitutions and preferred embodiments
ILLRCSSRRIRK

SEQ ID NO: 2219 - protein, 12 aa, Artificial Sequence
  Description of Artificial Sequence: Synthetic peptide
  N-term H or Acetyl
  MOD_RES (5)..(5): Modified Cys
  MOD_RES (7)..(7): Ser or Phospho-Ser
  See specification as filed for detailed description of substitutions and preferred embodiments
ILLRCSSRRIRL

SEQ ID NO: 2220 - protein, 12 aa, Artificial Sequence
  Description of Artificial Sequence: Synthetic peptide
  N-term H or Acetyl
  MOD_RES (5)..(5): Modified Cys
  MOD_RES (7)..(7): Ser or Phospho-Ser
  See specification as filed for detailed description of substitutions and preferred embodiments
ILLRCSSRRIRN

SEQ ID NO: 2221 - protein, 12 aa, Artificial Sequence
  Description of Artificial Sequence: Synthetic peptide
  N-term H or Acetyl
  MOD_RES (5)..(5): Modified Cys
  MOD_RES (7)..(7): Ser or Phospho-Ser
  See specification as filed for detailed description of substitutions and preferred embodiments
ILLRCSSRRIRP

SEQ ID NO: 2222 - protein, 12 aa, Artificial Sequence
  Description of Artificial Sequence: Synthetic peptide
  N-term H or Acetyl
  MOD_RES (5)..(5): Modified Cys
  MOD_RES (7)..(7): Ser or Phospho-Ser
  See specification as filed for detailed description of substitutions and preferred embodiments
ILLRCSSRRIRQ

SEQ ID NO: 2223 - protein, 12 aa, Artificial Sequence
  Description of Artificial Sequence: Synthetic peptide
  N-term H or Acetyl
  MOD_RES (5)..(5): Modified Cys
  MOD_RES (7)..(7): Ser or Phospho-Ser
  See specification as filed for detailed description of substitutions and preferred embodiments
ILLRCSSRRIRV

SEQ ID NO: 2224 - protein, 12 aa, Artificial Sequence
  Description of Artificial Sequence: Synthetic peptide
  N-term H or Acetyl
  MOD_RES (5)..(5): Modified Cys
  MOD_RES (7)..(7): Ser or Phospho-Ser
  See specification as filed for detailed description of substitutions and preferred embodiments
ILLRCSSRRIRW

SEQ ID NO: 2225 - protein, 12 aa, Artificial Sequence
  Description of Artificial Sequence: Synthetic peptide
  N-term H or Acetyl
  MOD_RES (5)..(5): Modified Cys
  MOD_RES (7)..(7): Ser or Phospho-Ser
  See specification as filed for detailed description of substitutions and preferred embodiments
ILLRCSSRRIVR

SEQ ID NO: 2226 - protein, 12 aa, Artificial Sequence
  Description of Artificial Sequence: Synthetic peptide
  N-term H or Acetyl
  MOD_RES (5)..(5): Modified Cys
  MOD_RES (7)..(7): Ser or Phospho-Ser
  See specification as filed for detailed description of substitutions and preferred embodiments
ILLRCSSRRIWR

SEQ ID NO: 2227 - protein, 12 aa, Artificial Sequence
  Description of Artificial Sequence: Synthetic peptide
  N-term H or Acetyl
  MOD_RES (5)..(5): Modified Cys
  MOD_RES (7)..(7): Ser or Phospho-Ser
  See specification as filed for detailed description of substitutions and preferred embodiments
ILLRCSSRRKRR

SEQ ID NO: 2228 - protein, 12 aa, Artificial Sequence
  Description of Artificial Sequence: Synthetic peptide
  N-term H or Acetyl
  MOD_RES (5)..(5): Modified Cys
  MOD_RES (7)..(7): Ser or Phospho-Ser
  See specification as filed for detailed description of substitutions and preferred embodiments
ILLRCSSRRLRR

SEQ ID NO: 2229 - protein, 12 aa, Artificial Sequence
  Description of Artificial Sequence: Synthetic peptide
  N-term H or Acetyl
  MOD_RES (5)..(5): Modified Cys
  MOD_RES (7)..(7): Ser or Phospho-Ser
  See specification as filed for detailed description of substitutions and preferred embodiments
ILLRCSSRRNRR

SEQ ID NO: 2230 - protein, 12 aa, Artificial Sequence
  Description of Artificial Sequence: Synthetic peptide
  N-term H or Acetyl
  MOD_RES (5)..(5): Modified Cys
  MOD_RES (7)..(7): Ser or Phospho-Ser
  See specification as filed for detailed description of substitutions and preferred embodiments
ILLRCSSRRPRR

SEQ ID NO: 2231 - protein, 12 aa, Artificial Sequence
  Description of Artificial Sequence: Synthetic peptide
  N-term H or Acetyl
  MOD_RES (5)..(5): Modified Cys
  MOD_RES (7)..(7): Ser or Phospho-Ser
  See specification as filed for detailed description of substitutions and preferred embodiments
ILLRCSSRRQRR

SEQ ID NO: 2232 - protein, 12 aa, Artificial Sequence
  Description of Artificial Sequence: Synthetic peptide
  N-term H or Acetyl
  MOD_RES (5)..(5): Modified Cys
  MOD_RES (7)..(7): Ser or Phospho-Ser
  See specification as filed for detailed description of substitutions and preferred embodiments
ILLRCSSRRRRR

SEQ ID NO: 2233 - protein, 12 aa, Artificial Sequence
  Description of Artificial Sequence: Synthetic peptide
  N-term H or Acetyl
  MOD_RES (5)..(5): Modified Cys
  MOD_RES (7)..(7): Ser or Phospho-Ser
  See specification as filed for detailed description of substitutions and preferred embodiments
ILLRCSSRRVRR

SEQ ID NO: 2234 - protein, 12 aa, Artificial Sequence
  Description of Artificial Sequence: Synthetic peptide
  N-term H or Acetyl
  MOD_RES (5)..(5): Modified Cys
  MOD_RES (7)..(7): Ser or Phospho-Ser
  See specification as filed for detailed description of substitutions and preferred embodiments
ILLRCSSRRWRR

SEQ ID NO: 2235 - protein, 12 aa, Artificial Sequence
  Description of Artificial Sequence: Synthetic peptide
  N-term H or Acetyl
  MOD_RES (5)..(5): Modified Cys
  MOD_RES (7)..(7): Ser or Phospho-Ser
  See specification as filed for detailed description of substitutions and preferred embodiments
ILLRCSSRVIRR

SEQ ID NO: 2236 - protein, 12 aa, Artificial Sequence
  Description of Artificial Sequence: Synthetic peptide
  N-term H or Acetyl
  MOD_RES (5)..(5): Modified Cys
  MOD_RES (7)..(7): Ser or Phospho-Ser
  See specification as filed for detailed description of substitutions and preferred embodiments
ILLRCSSRWIRR

SEQ ID NO: 2237 - protein, 12 aa, Artificial Sequence
  Description of Artificial Sequence: Synthetic peptide
  N-term H or Acetyl
  MOD_RES (5)..(5): Modified Cys
  MOD_RES (7)..(7): Ser or Phospho-Ser
  See specification as filed for detailed description of substitutions and preferred embodiments
ILLRCSSVRIRR

SEQ ID NO: 2238 - protein, 12 aa, Artificial Sequence
  Description of Artificial Sequence: Synthetic peptide
  N-term H or Acetyl
  MOD_RES (5)..(5): Modified Cys
  MOD_RES (7)..(7): Ser or Phospho-Ser
  See specification as filed for detailed description of substitutions and preferred embodiments
ILLRCSSWRIRR

SEQ ID NO: 2239 - protein, 12 aa, Artificial Sequence
  Description of Artificial Sequence: Synthetic peptide
  N-term H or Acetyl
  MOD_RES (5)..(5): Modified Cys
  MOD_RES (7)..(7): Ser or Phospho-Ser
  See specification as filed for detailed description of substitutions and preferred embodiments
ILLRCVSRRIRR

SEQ ID NO: 2240 - protein, 12 aa, Artificial Sequence
  Description of Artificial Sequence: Synthetic peptide
  N-term H or Acetyl
  MOD_RES (5)..(5): Modified Cys
  MOD_RES (7)..(7): Ser or Phospho-Ser
  See specification as filed for detailed description of substitutions and preferred embodiments
ILLRCWSRRIRR

SEQ ID NO: 2241 - protein, 23 aa, Artificial Sequence
  Description of Artificial Sequence: Synthetic peptide
  N-term H or Acetyl
  MOD_RES (7)..(7): Ser or Phospho-Ser
  MOD_RES (9)..(9): Modified Cys
  See specification as filed for detailed description of substitutions and preferred embodiments
ILLRESSRCRIRSGNKLGRIGRN

SEQ ID NO: 2242 - protein, 23 aa, Artificial Sequence
  Description of Artificial Sequence: Synthetic peptide
  N-term H or Acetyl
  MOD_RES (5)..(5): Leu or Nle (i.e. isomer of Leucine)
  MOD_RES (7)..(7): Ser or Phospho-Ser
  MOD_RES (9)..(9): Modified Cys
  See specification as filed for detailed description of substitutions and preferred embodiments
ILLSLSSRCRIRSGNKLGRIGRN

SEQ ID NO: 2243 - protein, 23 aa, Artificial Sequence
  Description of Artificial Sequence: Synthetic peptide
  N-term H or Acetyl
  MOD_RES (7)..(7): Ser or Phospho-Ser
  MOD_RES (9)..(9): Modified Cys
  See specification as filed for detailed description of substitutions and preferred embodiments
ILLSASSRCRIRSGNKLGRIGRN

SEQ ID NO: 2244 - protein, 10 aa, Artificial Sequence
  Description of Artificial Sequence: Synthetic peptide
  N-term H or Acetyl
  MOD_RES (5)..(5): Modified Cys
  MOD_RES (7)..(7): Ser or Phospho-Ser
  See specification as filed for detailed description of substitutions and preferred embodiments
ILLSCLSRRR

SEQ ID NO: 2245 - protein, 23 aa, Artificial Sequence
  Description of Artificial Sequence: Synthetic peptide
  N-term H or Acetyl
  MOD_RES (7)..(7): Ser or Phospho-Ser
  MOD_RES (9)..(9): Modified Cys
  See specification as filed for detailed description of substitutions and preferred embodiments
ILLSDSSRCRIRSGNKLGRIGRN

SEQ ID NO: 2246 - protein, 23 aa, Artificial Sequence
  Description of Artificial Sequence: Synthetic peptide
  N-term H or Acetyl
  MOD_RES (6)..(6): Leu or Nle (i.e. isomer of Leucine)
  MOD_RES (7)..(7): Ser or Phospho-Ser
  MOD_RES (9)..(9): Modified Cys
  See specification as filed for detailed description of substitutions and preferred embodiments
ILLSELSRCRIRSGNKLGRIGRN

SEQ ID NO: 2247 - protein, 23 aa, Artificial Sequence
  Description of Artificial Sequence: Synthetic peptide
  N-term H or Acetyl
  MOD_RES (7)..(7): Ser or Phospho-Ser
  MOD_RES (9)..(9): Modified Cys
  See specification as filed for detailed description of substitutions and preferred embodiments
ILLSEASRCRIRSGNKLGRIGRN

SEQ ID NO: 2248 - protein, 23 aa, Artificial Sequence
  Description of Artificial Sequence: Synthetic peptide
  N-term H or Acetyl
  MOD_RES (7)..(7): Ser or Phospho-Ser
  MOD_RES (9)..(9): Modified Cys
  See specification as filed for detailed description of substitutions and preferred embodiments
ILLSEDSRCRIRSGNKLGRIGRN

SEQ ID NO: 2249 - protein, 23 aa, Artificial Sequence
  Description of Artificial Sequence: Synthetic peptide
  N-term H or Acetyl
  MOD_RES (7)..(7): Ser or Phospho-Ser
  MOD_RES (9)..(9): Modified Cys
  See specification as filed for detailed description of substitutions and preferred embodiments
ILLSEESRCRIRSGNKLGRIGRN

SEQ ID NO: 2250 - protein, 23 aa, Artificial Sequence
  Description of Artificial Sequence: Synthetic peptide
  N-term H or Acetyl
  MOD_RES (7)..(7): Ser or Phospho-Ser
  MOD_RES (9)..(9): Modified Cys
  See specification as filed for detailed description of substitutions and preferred embodiments
ILLSEFSRCRIRSGNKLGRIGRN

SEQ ID NO: 2251 - protein, 23 aa, Artificial Sequence
  Description of Artificial Sequence: Synthetic peptide
  N-term H or Acetyl
  MOD_RES (7)..(7): Ser or Phospho-Ser
  MOD_RES (9)..(9): Modified Cys
  See specification as filed for detailed description of substitutions and preferred embodiments
ILLSEGSRCRIRSGNKLGRIGRN

SEQ ID NO: 2252 - protein, 23 aa, Artificial Sequence
  Description of Artificial Sequence: Synthetic peptide
  N-term H or Acetyl
  MOD_RES (7)..(7): Ser or Phospho-Ser
  MOD_RES (9)..(9): Modified Cys
  See specification as filed for detailed description of substitutions and preferred embodiments
ILLSEHSRCRIRSGNKLGRIGRN

SEQ ID NO: 2253 - protein, 23 aa, Artificial Sequence
  Description of Artificial Sequence: Synthetic peptide
  N-term H or Acetyl
  MOD_RES (7)..(7): Ser or Phospho-Ser
  MOD_RES (9)..(9): Modified Cys
  See specification as filed for detailed description of substitutions and preferred embodiments
ILLSEISRCRIRSGNKLGRIGRN

SEQ ID NO: 2254 - protein, 23 aa, Artificial Sequence
  Description of Artificial Sequence: Synthetic peptide
  N-term H or Acetyl
  MOD_RES (7)..(7): Ser or Phospho-Ser
  MOD_RES (9)..(9): Modified Cys
  See specification as filed for detailed description of substitutions and preferred embodiments
ILLSEKSRCRIRSGNKLGRIGRN

SEQ ID NO: 2255 - protein, 23 aa, Artificial Sequence
  Description of Artificial Sequence: Synthetic peptide
  N-term H or Acetyl
  MOD_RES (7)..(7): Ser or Phospho-Ser
  MOD_RES (9)..(9): Modified Cys
  See specification as filed for detailed description of substitutions and preferred embodiments
ILLSELSRCRIRSGNKLGRIGRN

SEQ ID NO: 2256 - protein, 23 aa, Artificial Sequence
  Description of Artificial Sequence: Synthetic peptide
  N-term H or Acetyl
  MOD_RES (7)..(7): Ser or Phospho-Ser
  MOD_RES (9)..(9): Modified Cys
  See specification as filed for detailed description of substitutions and preferred embodiments
ILLSENSRCRIRSGNKLGRIGRN

SEQ ID NO: 2257 - protein, 23 aa, Artificial Sequence
  Description of Artificial Sequence: Synthetic peptide
  N-term H or Acetyl
  MOD_RES (7)..(7): Ser or Phospho-Ser
  MOD_RES (9)..(9): Modified Cys
  See specification as filed for detailed description of substitutions and preferred embodiments
ILLSEPSRCRIRSGNKLGRIGRN

SEQ ID NO: 2258 - protein, 23 aa, Artificial Sequence
  Description of Artificial Sequence: Synthetic peptide
  N-term H or Acetyl
  MOD_RES (7)..(7): Ser or Phospho-Ser
  MOD_RES (9)..(9): Modified Cys
  See specification as filed for detailed description of substitutions and preferred embodiments
ILLSEQSRCRIRSGNKLGRIGRN

SEQ ID NO: 2259 - protein, 23 aa, Artificial Sequence
  Description of Artificial Sequence: Synthetic peptide
  N-term H or Acetyl
  MOD_RES (7)..(7): Ser or Phospho-Ser
  MOD_RES (9)..(9): Modified Cys
  See specification as filed for detailed description of substitutions and preferred embodiments
ILLSERSRCRIRSGNKLGRIGRN

SEQ ID NO: 2260 - protein, 23 aa, Artificial Sequence
  Description of Artificial Sequence: Synthetic peptide
  N-term H or Acetyl
  MOD_RES (7)..(7): Ser or Phospho-Ser
  MOD_RES (8)..(8): Leu or Nle (i.e. isomer of Leucine)
  MOD_RES (9)..(9): Modified Cys
  See specification as filed for detailed description of substitutions and preferred embodiments
ILLSESSLCRIRSGNKLGRIGRN

SEQ ID NO: 2261 - protein, 23 aa, Artificial Sequence
  Description of Artificial Sequence: Synthetic peptide
  N-term H or Acetyl
  MOD_RES (7)..(7): Ser or Phospho-Ser
  MOD_RES (9)..(9): Modified Cys
  See specification as filed for detailed description of substitutions and preferred embodiments
ILLSESSACRIRSGNKLGRIGRN

SEQ ID NO: 2262 - protein, 23 aa, Artificial Sequence
  Description of Artificial Sequence: Synthetic peptide
  N-term H or Acetyl
  MOD_RES (7)..(7): Ser or Phospho-Ser
  MOD_RES (9)..(9): Modified Cys
  See specification as filed for detailed description of substitutions and preferred embodiments
ILLSESSDCRIRSGNKLGRIGRN

SEQ ID NO: 2263 - protein, 23 aa, Artificial Sequence
  Description of Artificial Sequence: Synthetic peptide
  N-term H or Acetyl
  MOD_RES (7)..(7): Ser or Phospho-Ser
  MOD_RES (9)..(9): Modified Cys
  See specification as filed for detailed description of substitutions and preferred embodiments
ILLSESSECRIRSGNKLGRIGRN

SEQ ID NO: 2264 - protein, 23 aa, Artificial Sequence
  Description of Artificial Sequence: Synthetic peptide
  N-term H or Acetyl
  MOD_RES (7)..(7): Ser or Phospho-Ser
  MOD_RES (9)..(9): Modified Cys
  See specification as filed for detailed description of substitutions and preferred embodiments
ILLSESSFCRIRSGNKLGRIGRN

SEQ ID NO: 2265 - protein, 23 aa, Artificial Sequence
  Description of Artificial Sequence: Synthetic peptide
  N-term H or Acetyl
  MOD_RES (7)..(7): Ser or Phospho-Ser
  MOD_RES (9)..(9): Modified Cys
  See specification as filed for detailed description of substitutions and preferred embodiments
ILLSESSGCRIRSGNKLGRIGRN

SEQ ID NO: 2266 - protein, 23 aa, Artificial Sequence
  Description of Artificial Sequence: Synthetic peptide
  N-term H or Acetyl
  MOD_RES (7)..(7): Ser or Phospho-Ser
  MOD_RES (9)..(9): Modified Cys
  See specification as filed for detailed description of substitutions and preferred embodiments
ILLSESSHCRIRSGNKLGRIGRN

SEQ ID NO: 2267 - protein, 23 aa, Artificial Sequence
  Description of Artificial Sequence: Synthetic peptide
  N-term H or Acetyl
  MOD_RES (7)..(7): Ser or Phospho-Ser
  MOD_RES (9)..(9): Modified Cys
  See specification as filed for detailed description of substitutions and preferred embodiments
ILLSESSICRIRSGNKLGRIGRN

SEQ ID NO: 2268 - protein, 23 aa, Artificial Sequence
  Description of Artificial Sequence: Synthetic peptide
  N-term H or Acetyl
  MOD_RES (7)..(7): Ser or Phospho-Ser
  MOD_RES (9)..(9): Modified Cys
  See specification as filed for detailed description of substitutions and preferred embodiments
ILLSESSKCRIRSGNKLGRIGRN

SEQ ID NO: 2269 - protein, 23 aa, Artificial Sequence
  Description of Artificial Sequence: Synthetic peptide
  N-term H or Acetyl
  MOD_RES (7)..(7): Ser or Phospho-Ser
  MOD_RES (9)..(9): Modified Cys
  See specification as filed for detailed description of substitutions and preferred embodiments
ILLSESSLCRIRSGNKLGRIGRN

SEQ ID NO: 2270 - protein, 23 aa, Artificial Sequence
  Description of Artificial Sequence: Synthetic peptide
  N-term H or Acetyl
  MOD_RES (7)..(7): Ser or Phospho-Ser
  MOD_RES (9)..(9): Modified Cys
  See specification as filed for detailed description of substitutions and preferred embodiments
ILLSESSNCRIRSGNKLGRIGRN

SEQ ID NO: 2271 - protein, 23 aa, Artificial Sequence
  Description of Artificial Sequence: Synthetic peptide
  N-term H or Acetyl
  MOD_RES (7)..(7): Ser or Phospho-Ser
  MOD_RES (9)..(9): Modified Cys
  See specification as filed for detailed description of substitutions and preferred embodiments
ILLSESSPCRIRSGNKLGRIGRN

SEQ ID NO: 2272 - protein, 23 aa, Artificial Sequence
  Description of Artificial Sequence: Synthetic peptide
  N-term H or Acetyl
  MOD_RES (7)..(7): Ser or Phospho-Ser
  MOD_RES (9)..(9): Modified Cys
  See specification as filed for detailed description of substitutions and preferred embodiments
ILLSESSQCRIRSGNKLGRIGRN

SEQ ID NO: 2273 - protein, 23 aa, Artificial Sequence
  Description of Artificial Sequence: Synthetic peptide
  N-term H or Acetyl
  MOD_RES (7)..(7): Ser or Phospho-Ser
  MOD_RES (9)..(9): Modified Cys
  MOD_RES (10)..(10): Leu or Nle (i.e. isomer of Leucine)
  See specification as filed for detailed description of substitutions and preferred embodiments
ILLSESSRCLIRSGNKLGRIGRN

SEQ ID NO: 2274 - protein, 23 aa, Artificial Sequence
  Description of Artificial Sequence: Synthetic peptide
  N-term H or Acetyl
  MOD_RES (7)..(7): Ser or Phospho-Ser
  MOD_RES (9)..(9): Modified Cys
  See specification as filed for detailed description of substitutions and preferred embodiments
ILLSESSRCAIRSGNKLGRIGRN

SEQ ID NO: 2275 - protein, 23 aa, Artificial Sequence
  Description of Artificial Sequence: Synthetic peptide
  N-term H or Acetyl
  MOD_RES (7)..(7): Ser or Phospho-Ser
  MOD_RES (9)..(9): Modified Cys
  See specification as filed for detailed description of substitutions and preferred embodiments
ILLSESSRCDIRSGNKLGRIGRN

SEQ ID NO: 2276 - protein, 23 aa, Artificial Sequence
  Description of Artificial Sequence: Synthetic peptide
  N-term H or Acetyl
  MOD_RES (7)..(7): Ser or Phospho-Ser
  MOD_RES (9)..(9): Modified Cys
  See specification as filed for detailed description of substitutions and preferred embodiments
ILLSESSRCEIRSGNKLGRIGRN

SEQ ID NO: 2277 - protein, 23 aa, Artificial Sequence
  Description of Artificial Sequence: Synthetic peptide
  N-term H or Acetyl
  MOD_RES (7)..(7): Ser or Phospho-Ser
  MOD_RES (9)..(9): Modified Cys
  See specification as filed for detailed description of substitutions and preferred embodiments
ILLSESSRCFIRSGNKLGRIGRN

SEQ ID NO: 2278 - protein, 23 aa, Artificial Sequence
  Description of Artificial Sequence: Synthetic peptide
  N-term H or Acetyl
  MOD_RES (7)..(7): Ser or Phospho-Ser
  MOD_RES (9)..(9): Modified Cys
  See specification as filed for detailed description of substitutions and preferred embodiments
ILLSESSRCGIRSGNKLGRIGRN

SEQ ID NO: 2279 - protein, 23 aa, Artificial Sequence
  Description of Artificial Sequence: Synthetic peptide
  N-term H or Acetyl
  MOD_RES (7)..(7): Ser or Phospho-Ser
  MOD_RES (9)..(9): Modified Cys
  See specification as filed for detailed description of substitutions and preferred embodiments
ILLSESSRCHIRSGNKLGRIGRN

SEQ ID NO: 2280 - protein, 23 aa, Artificial Sequence
  Description of Artificial Sequence: Synthetic peptide
  N-term H or Acetyl
  MOD_RES (7)..(7): Ser or Phospho-Ser
  MOD_RES (9)..(9): Modified Cys
  See specification as filed for detailed description of substitutions and preferred embodiments
ILLSESSRCIIRSGNKLGRIGRN

SEQ ID NO: 2281 - protein, 23 aa, Artificial Sequence
  Description of Artificial Sequence: Synthetic peptide
  N-term H or Acetyl
  MOD_RES (7)..(7): Ser or Phospho-Ser
  MOD_RES (9)..(9): Modified Cys
  See specification as filed for detailed description of substitutions and preferred embodiments
ILLSESSRCKIRSGNKLGRIGRN

SEQ ID NO: 2282 - protein, 23 aa, Artificial Sequence
  Description of Artificial Sequence: Synthetic peptide
  N-term H or Acetyl
  MOD_RES (7)..(7): Ser or Phospho-Ser
  MOD_RES (9)..(9): Modified Cys
  See specification as filed for detailed description of substitutions and preferred embodiments
ILLSESSRCLIRSGNKLGRIGRN

SEQ ID NO: 2283 - protein, 23 aa, Artificial Sequence
  Description of Artificial Sequence: Synthetic peptide
  N-term H or Acetyl
  MOD_RES (7)..(7): Ser or Phospho-Ser
  MOD_RES (9)..(9): Modified Cys
  See specification as filed for detailed description of substitutions and preferred embodiments
ILLSESSRCNIRSGNKLGRIGRN

SEQ ID NO: 2284 - protein, 23 aa, Artificial Sequence
  Description of Artificial Sequence: Synthetic peptide
  N-term H or Acetyl
  MOD_RES (7)..(7): Ser or Phospho-Ser
  MOD_RES (9)..(9): Modified Cys
  See specification as filed for detailed description of substitutions and preferred embodiments
ILLSESSRCPIRSGNKLGRIGRN

SEQ ID NO: 2285 - protein, 23 aa, Artificial Sequence
  Description of Artificial Sequence: Synthetic peptide
  N-term H or Acetyl
  MOD_RES (7)..(7): Ser or Phospho-Ser
  MOD_RES (9)..(9): Modified Cys
  See specification as filed for detailed description of substitutions and preferred embodiments
ILLSESSRCQIRSGNKLGRIGRN

SEQ ID NO: 2286 - protein, 23 aa, Artificial Sequence
  Description of Artificial Sequence: Synthetic peptide
  N-term H or Acetyl
  MOD_RES (7)..(7): Ser or Phospho-Ser
  MOD_RES (9)..(9): Modified Cys
  MOD_RES (11)..(11): Leu or Nle (i.e. isomer of Leucine)
  See specification as filed for detailed description of substitutions and preferred embodiments
ILLSESSRCRLRSGNKLGRIGRN

SEQ ID NO: 2287 - protein, 23 aa, Artificial Sequence
  Description of Artificial Sequence: Synthetic peptide
  N-term H or Acetyl
  MOD_RES (7)..(7): Ser or Phospho-Ser
  MOD_RES (9)..(9): Modified Cys
  See specification as filed for detailed description of substitutions and preferred embodiments
ILLSESSRCRARSGNKLGRIGRN

SEQ ID NO: 2288 - protein, 23 aa, Artificial Sequence
  Description of Artificial Sequence: Synthetic peptide
  N-term H or Acetyl
  MOD_RES (7)..(7): Ser or Phospho-Ser
  MOD_RES (9)..(9): Modified Cys
  See specification as filed for detailed description of substitutions and preferred embodiments
ILLSESSRCRDRSGNKLGRIGRN

SEQ ID NO: 2289 - protein, 23 aa, Artificial Sequence
  Description of Artificial Sequence: Synthetic peptide
  N-term H or Acetyl
  MOD_RES (7)..(7): Ser or Phospho-Ser
  MOD_RES (9)..(9): Modified Cys
  See specification as filed for detailed description of substitutions and preferred embodiments
ILLSESSRCRERSGNKLGRIGRN

SEQ ID NO: 2290 - protein, 23 aa, Artificial Sequence
  Description of Artificial Sequence: Synthetic peptide
  N-term H or Acetyl
  MOD_RES (7)..(7): Ser or Phospho-Ser
  MOD_RES (9)..(9): Modified Cys
  See specification as filed for detailed description of substitutions and preferred embodiments
ILLSESSRCRFRSGNKLGRIGRN

SEQ ID NO: 2291 - protein, 23 aa, Artificial Sequence
  Description of Artificial Sequence: Synthetic peptide
  N-term H or Acetyl
  MOD_RES (7)..(7): Ser or Phospho-Ser
  MOD_RES (9)..(9): Modified Cys
  See specification as filed for detailed description of substitutions and preferred embodiments
ILLSESSRCRGRSGNKLGRIGRN

SEQ ID NO: 2292 - protein, 23 aa, Artificial Sequence
  Description of Artificial Sequence: Synthetic peptide
  N-term H or Acetyl
  MOD_RES (7)..(7): Ser or Phospho-Ser
  MOD_RES (9)..(9): Modified Cys
  See specification as filed for detailed description of substitutions and preferred embodiments
ILLSESSRCRHRSGNKLGRIGRN

SEQ ID NO: 2293 - protein, 23 aa, Artificial Sequence
  Description of Artificial Sequence: Synthetic peptide
  N-term H or Acetyl
  MOD_RES (7)..(7): Ser or Phospho-Ser
  MOD_RES (9)..(9): Modified Cys
  MOD_RES (12)..(12): Leu or Nle (i.e. isomer of Leucine)
  See specification as filed for detailed description of substitutions and preferred embodiments
ILLSESSRCRILSGNKLGRIGRN

SEQ ID NO: 2294 - protein, 23 aa, Artificial Sequence
  Description of Artificial Sequence: Synthetic peptide
  N-term H or Acetyl
  MOD_RES (7)..(7): Ser or Phospho-Ser
  MOD_RES (9)..(9): Modified Cys
  See specification as filed for detailed description of substitutions and preferred embodiments
ILLSESSRCRIASGNKLGRIGRN

SEQ ID NO: 2295 - protein, 23 aa, Artificial Sequence
  Description of Artificial Sequence: Synthetic peptide
  N-term H or Acetyl
  MOD_RES (7)..(7): Ser or Phospho-Ser
  MOD_RES (9)..(9): Modified Cys
  See specification as filed for detailed description of substitutions and preferred embodiments
ILLSESSRCRIDSGNKLGRIGRN

SEQ ID NO: 2296 - protein, 23 aa, Artificial Sequence
  Description of Artificial Sequence: Synthetic peptide
  N-term H or Acetyl
  MOD_RES (7)..(7): Ser or Phospho-Ser
  MOD_RES (9)..(9): Modified Cys
  See specification as filed for detailed description of substitutions and preferred embodiments
ILLSESSRCRIESGNKLGRIGRN

SEQ ID NO: 2297 - protein, 23 aa, Artificial Sequence
  Description of Artificial Sequence: Synthetic peptide
  N-term H or Acetyl
  MOD_RES (7)..(7): Ser or Phospho-Ser
  MOD_RES (9)..(9): Modified Cys
  See specification as filed for detailed description of substitutions and preferred embodiments
ILLSESSRCRIFSGNKLGRIGRN

SEQ ID NO: 2298 - protein, 23 aa, Artificial Sequence
  Description of Artificial Sequence: Synthetic peptide
  N-term H or Acetyl
  MOD_RES (7)..(7): Ser or Phospho-Ser
  MOD_RES (9)..(9): Modified Cys
  See specification as filed for detailed description of substitutions and preferred embodiments
ILLSESSRCRIGSGNKLGRIGRN

SEQ ID NO: 2299 - protein, 23 aa, Artificial Sequence
  Description of Artificial Sequence: Synthetic peptide
  N-term H or Acetyl
  MOD_RES (7)..(7): Ser or Phospho-Ser
  MOD_RES (9)..(9): Modified Cys
  See specification as filed for detailed description of substitutions and preferred embodiments
ILLSESSRCRIHSGNKLGRIGRN

SEQ ID NO: 2300 - protein, 23 aa, Artificial Sequence
  Description of Artificial Sequence: Synthetic peptide
  N-term H or Acetyl
  MOD_RES (7)..(7): Ser or Phospho-Ser
  MOD_RES (9)..(9): Modified Cys
  See specification as filed for detailed description of substitutions and preferred embodiments
ILLSESSRCRIISGNKLGRIGRN

SEQ ID NO: 2301 - protein, 23 aa, Artificial Sequence
  Description of Artificial Sequence: Synthetic peptide
  N-term H or Acetyl
  MOD_RES (7)..(7): Ser or Phospho-Ser
  MOD_RES (9)..(9): Modified Cys
  See specification as filed for detailed description of substitutions and preferred embodiments
ILLSESSRCRIKSGNKLGRIGRN

SEQ ID NO: 2302 - protein, 23 aa, Artificial Sequence
  Description of Artificial Sequence: Synthetic peptide
  N-term H or Acetyl
  MOD_RES (7)..(7): Ser or Phospho-Ser
  MOD_RES (9)..(9): Modified Cys
  See specification as filed for detailed description of substitutions and preferred embodiments
ILLSESSRCRILSGNKLGRIGRN

SEQ ID NO: 2303 - protein, 23 aa, Artificial Sequence
  Description of Artificial Sequence: Synthetic peptide
  N-term H or Acetyl
  MOD_RES (7)..(7): Ser or Phospho-Ser
  MOD_RES (9)..(9): Modified Cys
  See specification as filed for detailed description of substitutions and preferred embodiments
ILLSESSRCRINSGNKLGRIGRN

SEQ ID NO: 2304 - protein, 23 aa, Artificial Sequence
  Description of Artificial Sequence: Synthetic peptide
  N-term H or Acetyl
  MOD_RES (7)..(7): Ser or Phospho-Ser
  MOD_RES (9)..(9): Modified Cys
  See specification as filed for detailed description of substitutions and preferred embodiments
ILLSESSRCRIPSGNKLGRIGRN

SEQ ID NO: 2305 - protein, 23 aa, Artificial Sequence
  Description of Artificial Sequence: Synthetic peptide
  N-term H or Acetyl
  MOD_RES (7)..(7): Ser or Phospho-Ser
  MOD_RES (9)..(9): Modified Cys
  See specification as filed for detailed description of substitutions and preferred embodiments
ILLSESSRCRIQSGNKLGRIGRN

SEQ ID NO: 2306 - protein, 23 aa, Artificial Sequence
  Description of Artificial Sequence: Synthetic peptide
  N-term H or Acetyl
  MOD_RES (7)..(7): Ser or Phospho-Ser
  MOD_RES (9)..(9): Modified Cys
  MOD_RES (13)..(13): Leu or Nle (i.e. isomer of Leucine)
  See specification as filed for detailed description of substitutions and preferred embodiments
ILLSESSRCRIRLGNKLGRIGRN

SEQ ID NO: 2307 - protein, 23 aa, Artificial Sequence
  Description of Artificial Sequence: Synthetic peptide
  N-term H or Acetyl
  MOD_RES (7)..(7): Ser or Phospho-Ser
  MOD_RES (9)..(9): Modified Cys
  See specification as filed for detailed description of substitutions and preferred embodiments
ILLSESSRCRIRAGNKLGRIGRN

SEQ ID NO: 2308 - protein, 23 aa, Artificial Sequence
  Description of Artificial Sequence: Synthetic peptide
  N-term H or Acetyl
  MOD_RES (7)..(7): Ser or Phospho-Ser
  MOD_RES (9)..(9): Modified Cys
  See specification as filed for detailed description of substitutions and preferred embodiments
ILLSESSRCRIRDGNKLGRIGRN

SEQ ID NO: 2309 - protein, 23 aa, Artificial Sequence
  Description of Artificial Sequence: Synthetic peptide
  N-term H or Acetyl
  MOD_RES (7)..(7): Ser or Phospho-Ser
  MOD_RES (9)..(9): Modified Cys
  See specification as filed for detailed description of substitutions and preferred embodiments
ILLSESSRCRIREGNKLGRIGRN

SEQ ID NO: 2310 - protein, 23 aa, Artificial Sequence
  Description of Artificial Sequence: Synthetic peptide
  N-term H or Acetyl
  MOD_RES (7)..(7): Ser or Phospho-Ser
  MOD_RES (9)..(9): Modified Cys
  See specification as filed for detailed description of substitutions and preferred embodiments
ILLSESSRCRIRFGNKLGRIGRN

SEQ ID NO: 2311 - protein, 23 aa, Artificial Sequence
  Description of Artificial Sequence: Synthetic peptide
  N-term H or Acetyl
  MOD_RES (7)..(7): Ser or Phospho-Ser
  MOD_RES (9)..(9): Modified Cys
  See specification as filed for detailed description of substitutions and preferred embodiments
ILLSESSRCRIRGGNKLGRIGRN

SEQ ID NO: 2312 - protein, 23 aa, Artificial Sequence
  Description of Artificial Sequence: Synthetic peptide
  N-term H or Acetyl
  MOD_RES (7)..(7): Ser or Phospho-Ser
  MOD_RES (9)..(9): Modified Cys
  See specification as filed for detailed description of substitutions and preferred embodiments
ILLSESSRCRIRHGNKLGRIGRN

SEQ ID NO: 2313 - protein, 23 aa, Artificial Sequence
  Description of Artificial Sequence: Synthetic peptide
  N-term H or Acetyl
  MOD_RES (7)..(7): Ser or Phospho-Ser
  MOD_RES (9)..(9): Modified Cys
  See specification as filed for detailed description of substitutions and preferred embodiments
ILLSESSRCRIRIGNKLGRIGRN

SEQ ID NO: 2314 - protein, 23 aa, Artificial Sequence
  Description of Artificial Sequence: Synthetic peptide
  N-term H or Acetyl
  MOD_RES (7)..(7): Ser or Phospho-Ser
  MOD_RES (9)..(9): Modified Cys
  See specification as filed for detailed description of substitutions and preferred embodiments
ILLSESSRCRIRKGNKLGRIGRN

SEQ ID NO: 2315 - protein, 23 aa, Artificial Sequence
  Description of Artificial Sequence: Synthetic peptide
  N-term H or Acetyl
  MOD_RES (7)..(7): Ser or Phospho-Ser
  MOD_RES (9)..(9): Modified Cys
  See specification as filed for detailed description of substitutions and preferred embodiments
ILLSESSRCRIRLGNKLGRIGRN

SEQ ID NO: 2316 - protein, 23 aa, Artificial Sequence
  Description of Artificial Sequence: Synthetic peptide
  N-term H or Acetyl
  MOD_RES (7)..(7): Ser or Phospho-Ser
  MOD_RES (9)..(9): Modified Cys
  See specification as filed for detailed description of substitutions and preferred embodiments
ILLSESSRCRIRNGNKLGRIGRN

SEQ ID NO: 2317 - protein, 23 aa, Artificial Sequence
  Description of Artificial Sequence: Synthetic peptide
  N-term H or Acetyl
  MOD_RES (7)..(7): Ser or Phospho-Ser
  MOD_RES (9)..(9): Modified Cys
  See specification as filed for detailed description of substitutions and preferred embodiments
ILLSESSRCRIRPGNKLGRIGRN

SEQ ID NO: 2318 - protein, 23 aa, Artificial Sequence
  Description of Artificial Sequence: Synthetic peptide
  N-term H or Acetyl
  MOD_RES (7)..(7): Ser or Phospho-Ser
  MOD_RES (9)..(9): Modified Cys
  See specification as filed for detailed description of substitutions and preferred embodiments
ILLSESSRCRIRQGNKLGRIGRN

SEQ ID NO: 2319 - protein, 23 aa, Artificial Sequence
  Description of Artificial Sequence: Synthetic peptide
  N-term H or Acetyl
  MOD_RES (7)..(7): Ser or Phospho-Ser
  MOD_RES (9)..(9): Modified Cys
  See specification as filed for detailed description of substitutions and preferred embodiments
ILLSESSRCRIRRGNKLGRIGRN

SEQ ID NO: 2320 - protein, 23 aa, Artificial Sequence
  Description of Artificial Sequence: Synthetic peptide
  N-term H or Acetyl
  MOD_RES (7)..(7): Ser or Phospho-Ser
  MOD_RES (9)..(9): Modified Cys
  MOD_RES (14)..(14): Leu or Nle (i.e. isomer of Leucine)
  See specification as filed for detailed description of substitutions and preferred embodiments
ILLSESSRCRIRSLNKLGRIGRN

SEQ ID NO: 2321 - protein, 23 aa, Artificial Sequence
  Description of Artificial Sequence: Synthetic peptide
  N-term H or Acetyl
  MOD_RES (7)..(7): Ser or Phospho-Ser
  MOD_RES (9)..(9): Modified Cys
  See specification as filed for detailed description of substitutions and preferred embodiments
ILLSESSRCRIRSANKLGRIGRN

SEQ ID NO: 2322 - protein, 23 aa, Artificial Sequence
  Description of Artificial Sequence: Synthetic peptide
  N-term H or Acetyl
  MOD_RES (7)..(7): Ser or Phospho-Ser
  MOD_RES (9)..(9): Modified Cys
  See specification as filed for detailed description of substitutions and preferred embodiments
ILLSESSRCRIRSDNKLGRIGRN

SEQ ID NO: 2323 - protein, 23 aa, Artificial Sequence
  Description of Artificial Sequence: Synthetic peptide
  N-term H or Acetyl
  MOD_RES (7)..(7): Ser or Phospho-Ser
  MOD_RES (9)..(9): Modified Cys
  See specification as filed for detailed description of substitutions and preferred embodiments
ILLSESSRCRIRSENKLGRIGRN

SEQ ID NO: 2324 - protein, 23 aa, Artificial Sequence
  Description of Artificial Sequence: Synthetic peptide
  N-term H or Acetyl
  MOD_RES (7)..(7): Ser or Phospho-Ser
  MOD_RES (9)..(9): Modified Cys
  See specification as filed for detailed description of substitutions and preferred embodiments
ILLSESSRCRIRSFNKLGRIGRN

SEQ ID NO: 2325 - protein, 23 aa, Artificial Sequence
  Description of Artificial Sequence: Synthetic peptide
  N-term H or Acetyl
  MOD_RES (7)..(7): Ser or Phospho-Ser
  MOD_RES (9)..(9): Modified Cys
  MOD_RES (15)..(15): Leu or Nle (i.e. isomer of Leucine)
  See specification as filed for detailed description of substitutions and preferred embodiments
ILLSESSRCRIRSGLKLGRIGRN

SEQ ID NO: 2326 - protein, 23 aa, Artificial Sequence
  Description of Artificial Sequence: Synthetic peptide
  N-term H or Acetyl
  MOD_RES (7)..(7): Ser or Phospho-Ser
  MOD_RES (9)..(9): Modified Cys
  See specification as filed for detailed description of substitutions and preferred embodiments
ILLSESSRCRIRSGAKLGRIGRN

SEQ ID NO: 2327 - protein, 23 aa, Artificial Sequence
  Description of Artificial Sequence: Synthetic peptide
  N-term H or Acetyl
  MOD_RES (7)..(7): Ser or Phospho-Ser
  MOD_RES (9)..(9): Modified Cys
  See specification as filed for detailed description of substitutions and preferred embodiments
ILLSESSRCRIRSGDKLGRIGRN

SEQ ID NO: 2328 - protein, 23 aa, Artificial Sequence
  Description of Artificial Sequence: Synthetic peptide
  N-term H or Acetyl
  MOD_RES (7)..(7): Ser or Phospho-Ser
  MOD_RES (9)..(9): Modified Cys
  See specification as filed for detailed description of substitutions and preferred embodiments
ILLSESSRCRIRSGEKLGRIGRN

SEQ ID NO: 2329 - protein, 23 aa, Artificial Sequence
  Description of Artificial Sequence: Synthetic peptide
  N-term H or Acetyl
  MOD_RES (7)..(7): Ser or Phospho-Ser
  MOD_RES (9)..(9): Modified Cys
  See specification as filed for detailed description of substitutions and preferred embodiments
ILLSESSRCRIRSGFKLGRIGRN

SEQ ID NO: 2330 - protein, 23 aa, Artificial Sequence
  Description of Artificial Sequence: Synthetic peptide
  N-term H or Acetyl
  MOD_RES (7)..(7): Ser or Phospho-Ser
  MOD_RES (9)..(9): Modified Cys
  See specification as filed for detailed description of substitutions and preferred embodiments
ILLSESSRCRIRSGGKLGRIGRN

SEQ ID NO: 2331 - protein, 23 aa, Artificial Sequence
  Description of Artificial Sequence: Synthetic peptide
  N-term H or Acetyl
  MOD_RES (7)..(7): Ser or Phospho-Ser
  MOD_RES (9)..(9): Modified Cys
  See specification as filed for detailed description of substitutions and preferred embodiments
ILLSESSRCRIRSGHKLGRIGRN

SEQ ID NO: 2332 - protein, 23 aa, Artificial Sequence
  Description of Artificial Sequence: Synthetic peptide
  N-term H or Acetyl
  MOD_RES (7)..(7): Ser or Phospho-Ser
  MOD_RES (9)..(9): Modified Cys
  See specification as filed for detailed description of substitutions and preferred embodiments
ILLSESSRCRIRSGIKLGRIGRN

SEQ ID NO: 2333 - protein, 23 aa, Artificial Sequence
  Description of Artificial Sequence: Synthetic peptide
  N-term H or Acetyl
  MOD_RES (7)..(7): Ser or Phospho-Ser
  MOD_RES (9)..(9): Modified Cys
  See specification as filed for detailed description of substitutions and preferred embodiments
ILLSESSRCRIRSGKKLGRIGRN

SEQ ID NO: 2334 - protein, 23 aa, Artificial Sequence
  Description of Artificial Sequence: Synthetic peptide
  N-term H or Acetyl
  MOD_RES (7)..(7): Ser or Phospho-Ser
  MOD_RES (9)..(9): Modified Cys
  See specification as filed for detailed description of substitutions and preferred embodiments
ILLSESSRCRIRSGLKLGRIGRN

SEQ ID NO: 2335 - protein, 23 aa, Artificial Sequence
  Description of Artificial Sequence: Synthetic peptide
  N-term H or Acetyl
  MOD_RES (7)..(7): Ser or Phospho-Ser
  MOD_RES (9)..(9): Modified Cys
  MOD_RES (16)..(16): Leu or Nle (i.e. isomer of Leucine)
  See specification as filed for detailed description of substitutions and preferred embodiments
ILLSESSRCRIRSGNLLGRIGRN

SEQ ID NO: 2336 - protein, 23 aa, Artificial Sequence
  Description of Artificial Sequence: Synthetic peptide
  N-term H or Acetyl
  MOD_RES (7)..(7): Ser or Phospho-Ser
  MOD_RES (9)..(9): Modified Cys
  See specification as filed for detailed description of substitutions and preferred embodiments
ILLSESSRCRIRSGNALGRIGRN

SEQ ID NO: 2337 - protein, 23 aa, Artificial Sequence
  Description of Artificial Sequence: Synthetic peptide
  N-term H or Acetyl
  MOD_RES (7)..(7): Ser or Phospho-Ser
  MOD_RES (9)..(9): Modified Cys
  See specification as filed for detailed description of substitutions and preferred embodiments
ILLSESSRCRIRSGNDLGRIGRN

SEQ ID NO: 2338 - protein, 23 aa, Artificial Sequence
  Description of Artificial Sequence: Synthetic peptide
  N-term H or Acetyl
  MOD_RES (7)..(7): Ser or Phospho-Ser
  MOD_RES (9)..(9): Modified Cys
  See specification as filed for detailed description of substitutions and preferred embodiments
ILLSESSRCRIRSGNELGRIGRN

SEQ ID NO: 2339 - protein, 23 aa, Artificial Sequence
  Description of Artificial Sequence: Synthetic peptide
  N-term H or Acetyl
  MOD_RES (7)..(7): Ser or Phospho-Ser
  MOD_RES (9)..(9): Modified Cys
  See specification as filed for detailed description of substitutions and preferred embodiments
ILLSESSRCRIRSGNFLGRIGRN

SEQ ID NO: 2340 - protein, 23 aa, Artificial Sequence
  Description of Artificial Sequence: Synthetic peptide
  N-term H or Acetyl
  MOD_RES (7)..(7): Ser or Phospho-Ser
  MOD_RES (9)..(9): Modified Cys
  See specification as filed for detailed description of substitutions and preferred embodiments
ILLSESSRCRIRSGNGLGRIGRN

SEQ ID NO: 2341 - protein, 23 aa, Artificial Sequence
  Description of Artificial Sequence: Synthetic peptide
  N-term H or Acetyl
  MOD_RES (7)..(7): Ser or Phospho-Ser
  MOD_RES (9)..(9): Modified Cys
  See specification as filed for detailed description of substitutions and preferred embodiments
ILLSESSRCRIRSGNHLGRIGRN

SEQ ID NO: 2342 - protein, 23 aa, Artificial Sequence
  Description of Artificial Sequence: Synthetic peptide
  N-term H or Acetyl
  MOD_RES (7)..(7): Ser or Phospho-Ser
  MOD_RES (9)..(9): Modified Cys
  See specification as filed for detailed description of substitutions and preferred embodiments
ILLSESSRCRIRSGNILGRIGRN

SEQ ID NO: 2343 - protein, 23 aa, Artificial Sequence
  Description of Artificial Sequence: Synthetic peptide
  N-term H or Acetyl
  MOD_RES (7)..(7): Ser or Phospho-Ser
  MOD_RES (9)..(9): Modified Cys
  MOD_RES (17)..(17): Leu or Nle (i.e. isomer of Leucine)
  See specification as filed for detailed description of substitutions and preferred embodiments
ILLSESSRCRIRSGNKLGRIGRN

SEQ ID NO: 2344 - protein, 23 aa, Artificial Sequence
  Description of Artificial Sequence: Synthetic peptide
  N-term H or Acetyl
  MOD_RES (7)..(7): Ser or Phospho-Ser
  MOD_RES (9)..(9): Modified Cys
  See specification as filed for detailed description of substitutions and preferred embodiments
ILLSESSRCRIRSGNKAGRIGRN

SEQ ID NO: 2345 - protein, 23 aa, Artificial Sequence
  Description of Artificial Sequence: Synthetic peptide
  N-term H or Acetyl
  MOD_RES (7)..(7): Ser or Phospho-Ser
  MOD_RES (9)..(9): Modified Cys
  See specification as filed for detailed description of substitutions and preferred embodiments
ILLSESSRCRIRSGNKDGRIGRN

SEQ ID NO: 2346 - protein, 23 aa, Artificial Sequence
  Description of Artificial Sequence: Synthetic peptide
  N-term H or Acetyl
  MOD_RES (7)..(7): Ser or Phospho-Ser
  MOD_RES (9)..(9): Modified Cys
  See specification as filed for detailed description of substitutions and preferred embodiments
ILLSESSRCRIRSGNKEGRIGRN

SEQ ID NO: 2347 - protein, 23 aa, Artificial Sequence
  Description of Artificial Sequence: Synthetic peptide
  N-term H or Acetyl
  MOD_RES (7)..(7): Ser or Phospho-Ser
  MOD_RES (9)..(9): Modified Cys
  See specification as filed for detailed description of substitutions and preferred embodiments
ILLSESSRCRIRSGNKFGRIGRN

SEQ ID NO: 2348 - protein, 23 aa, Artificial Sequence
  Description of Artificial Sequence: Synthetic peptide
  N-term H or Acetyl
  MOD_RES (7)..(7): Ser or Phospho-Ser
  MOD_RES (9)..(9): Modified Cys
  See specification as filed for detailed description of substitutions and preferred embodiments
ILLSESSRCRIRSGNKGGRIGRN

SEQ ID NO: 2349 - protein, 23 aa, Artificial Sequence
  Description of Artificial Sequence: Synthetic peptide
  N-term H or Acetyl
  MOD_RES (7)..(7): Ser or Phospho-Ser
  MOD_RES (9)..(9): Modified Cys
  See specification as filed for detailed description of substitutions and preferred embodiments
ILLSESSRCRIRSGNKHGRIGRN

SEQ ID NO: 2350 - protein, 23 aa, Artificial Sequence
  Description of Artificial Sequence: Synthetic peptide
  N-term H or Acetyl
  MOD_RES (7)..(7): Ser or Phospho-Ser
  MOD_RES (9)..(9): Modified Cys
  See specification as filed for detailed description of substitutions and preferred embodiments
ILLSESSRCRIRSGNKIGRIGRN

SEQ ID NO: 2351 - protein, 23 aa, Artificial Sequence
  Description of Artificial Sequence: Synthetic peptide
  N-term H or Acetyl
  MOD_RES (7)..(7): Ser or Phospho-Ser
  MOD_RES (9)..(9): Modified Cys
  See specification as filed for detailed description of substitutions and preferred embodiments
ILLSESSRCRIRSGNKKGRIGRN

SEQ ID NO: 2352 - protein, 23 aa, Artificial Sequence
  Description of Artificial Sequence: Synthetic peptide
  N-term H or Acetyl
  MOD_RES (7)..(7): Ser or Phospho-Ser
  MOD_RES (9)..(9): Modified Cys
  MOD_RES (18)..(18): Leu or Nle (i.e. isomer of Leucine)
  See specification as filed for detailed description of substitutions and preferred embodiments
ILLSESSRCRIRSGNKLLRIGRN

SEQ ID NO: 2353 - protein, 23 aa, Artificial Sequence
  Description of Artificial Sequence: Synthetic peptide
  N-term H or Acetyl
  MOD_RES (7)..(7): Ser or Phospho-Ser
  MOD_RES (9)..(9): Modified Cys
  See specification as filed for detailed description of substitutions and preferred embodiments
ILLSESSRCRIRSGNKLARIGRN

SEQ ID NO: 2354 - protein, 23 aa, Artificial Sequence
  Description of Artificial Sequence: Synthetic peptide
  N-term H or Acetyl
  MOD_RES (7)..(7): Ser or Phospho-Ser
  MOD_RES (9)..(9): Modified Cys
  See specification as filed for detailed description of substitutions and preferred embodiments
ILLSESSRCRIRSGNKLDRIGRN

SEQ ID NO: 2355 - protein, 23 aa, Artificial Sequence
  Description of Artificial Sequence: Synthetic peptide
  N-term H or Acetyl
  MOD_RES (7)..(7): Ser or Phospho-Ser
  MOD_RES (9)..(9): Modified Cys
  See specification as filed for detailed description of substitutions and preferred embodiments
ILLSESSRCRIRSGNKLERIGRN

SEQ ID NO: 2356 - protein, 23 aa, Artificial Sequence
  Description of Artificial Sequence: Synthetic peptide
  N-term H or Acetyl
  MOD_RES (7)..(7): Ser or Phospho-Ser
  MOD_RES (9)..(9): Modified Cys
  See specification as filed for detailed description of substitutions and preferred embodiments
ILLSESSRCRIRSGNKLFRIGRN

SEQ ID NO: 2357 - protein, 23 aa, Artificial Sequence
  Description of Artificial Sequence: Synthetic peptide
  N-term H or Acetyl
  MOD_RES (7)..(7): Ser or Phospho-Ser
  MOD_RES (9)..(9): Modified Cys
  MOD_RES (19)..(19): Leu or Nle (i.e. isomer of Leucine)
  See specification as filed for detailed description of substitutions and preferred embodiments
ILLSESSRCRIRSGNKLGLIGRN

SEQ ID NO: 2358 - protein, 23 aa, Artificial Sequence
  Description of Artificial Sequence: Synthetic peptide
  N-term H or Acetyl
  MOD_RES (7)..(7): Ser or Phospho-Ser
  MOD_RES (9)..(9): Modified Cys
  See specification as filed for detailed description of substitutions and preferred embodiments
ILLSESSRCRIRSGNKLGAIGRN

SEQ ID NO: 2359 - protein, 23 aa, Artificial Sequence
  Description of Artificial Sequence: Synthetic peptide
  N-term H or Acetyl
  MOD_RES (7)..(7): Ser or Phospho-Ser
  MOD_RES (9)..(9): Modified Cys
  See specification as filed for detailed description of substitutions and preferred embodiments
ILLSESSRCRIRSGNKLGDIGRN

SEQ ID NO: 2360 - protein, 23 aa, Artificial Sequence
  Description of Artificial Sequence: Synthetic peptide
  N-term H or Acetyl
  MOD_RES (7)..(7): Ser or Phospho-Ser
  MOD_RES (9)..(9): Modified Cys
  See specification as filed for detailed description of substitutions and preferred embodiments
ILLSESSRCRIRSGNKLGEIGRN

SEQ ID NO: 2361 - protein, 23 aa, Artificial Sequence
  Description of Artificial Sequence: Synthetic peptide
  N-term H or Acetyl
  MOD_RES (7)..(7): Ser or Phospho-Ser
  MOD_RES (9)..(9): Modified Cys
  See specification as filed for detailed description of substitutions and preferred embodiments
ILLSESSRCRIRSGNKLGFIGRN

SEQ ID NO: 2362 - protein, 23 aa, Artificial Sequence
  Description of Artificial Sequence: Synthetic peptide
  N-term H or Acetyl
  MOD_RES (7)..(7): Ser or Phospho-Ser
  MOD_RES (9)..(9): Modified Cys
  See specification as filed for detailed description of substitutions and preferred embodiments
ILLSESSRCRIRSGNKLGGIGRN

SEQ ID NO: 2363 - protein, 23 aa, Artificial Sequence
  Description of Artificial Sequence: Synthetic peptide
  N-term H or Acetyl
  MOD_RES (7)..(7): Ser or Phospho-Ser
  MOD_RES (9)..(9): Modified Cys
  See specification as filed for detailed description of substitutions and preferred embodiments
ILLSESSRCRIRSGNKLGHIGRN

SEQ ID NO: 2364 - protein, 23 aa, Artificial Sequence
  Description of Artificial Sequence: Synthetic peptide
  N-term H or Acetyl
  MOD_RES (7)..(7): Ser or Phospho-Ser
  MOD_RES (9)..(9): Modified Cys
  See specification as filed for detailed description of substitutions and preferred embodiments
ILLSESSRCRIRSGNKLGIIGRN

SEQ ID NO: 2365 - protein, 23 aa, Artificial Sequence
  Description of Artificial Sequence: Synthetic peptide
  N-term H or Acetyl
  MOD_RES (7)..(7): Ser or Phospho-Ser
  MOD_RES (9)..(9): Modified Cys
  See specification as filed for detailed description of substitutions and preferred embodiments
ILLSESSRCRIRSGNKLGKIGRN

SEQ ID NO: 2366 - protein, 23 aa, Artificial Sequence
  Description of Artificial Sequence: Synthetic peptide
  N-term H or Acetyl
  MOD_RES (7)..(7): Ser or Phospho-Ser
  MOD_RES (9)..(9): Modified Cys
  See specification as filed for detailed description of substitutions and preferred embodiments
ILLSESSRCRIRSGNKLGLIGRN

SEQ ID NO: 2367 - protein, 23 aa, Artificial Sequence
  Description of Artificial Sequence: Synthetic peptide
  N-term H or Acetyl
  MOD_RES (7)..(7): Ser or Phospho-Ser
  MOD_RES (9)..(9): Modified Cys
  See specification as filed for detailed description of substitutions and preferred embodiments
ILLSESSRCRIRSGNKLGNIGRN

SEQ ID NO: 2368 - protein, 23 aa, Artificial Sequence
  Description of Artificial Sequence: Synthetic peptide
  N-term H or Acetyl
  MOD_RES (7)..(7): Ser or Phospho-Ser
  MOD_RES (9)..(9): Modified Cys
  See specification as filed for detailed description of substitutions and preferred embodiments
ILLSESSRCRIRSGNKLGPIGRN

SEQ ID NO: 2369 - protein, 23 aa, Artificial Sequence
  Description of Artificial Sequence: Synthetic peptide
  N-term H or Acetyl
  MOD_RES (7)..(7): Ser or Phospho-Ser
  MOD_RES (9)..(9): Modified Cys
  See specification as filed for detailed description of substitutions and preferred embodiments
ILLSESSRCRIRSGNKLGQIGRN

SEQ ID NO: 2370 - protein, 23 aa, Artificial Sequence
  Description of Artificial Sequence: Synthetic peptide
  N-term H or Acetyl
  MOD_RES (7)..(7): Ser or Phospho-Ser
  MOD_RES (9)..(9): Modified Cys
  MOD_RES (20)..(20): Leu or Nle (i.e. isomer of Leucine)
  See specification as filed for detailed description of substitutions and preferred embodiments
ILLSESSRCRIRSGNKLGRLGRN

SEQ ID NO: 2371 - protein, 23 aa, Artificial Sequence
  Description of Artificial Sequence: Synthetic peptide
  N-term H or Acetyl
  MOD_RES (7)..(7): Ser or Phospho-Ser
  MOD_RES (9)..(9): Modified Cys
  See specification as filed for detailed description of substitutions and preferred embodiments
ILLSESSRCRIRSGNKLGRAGRN

SEQ ID NO: 2372 - protein, 23 aa, Artificial Sequence
  Description of Artificial Sequence: Synthetic peptide
  N-term H or Acetyl
  MOD_RES (7)..(7): Ser or Phospho-Ser
  MOD_RES (9)..(9): Modified Cys
  See specification as filed for detailed description of substitutions and preferred embodiments
ILLSESSRCRIRSGNKLGRDGRN

SEQ ID NO: 2373 - protein, 23 aa, Artificial Sequence
  Description of Artificial Sequence: Synthetic peptide
  N-term H or Acetyl
  MOD_RES (7)..(7): Ser or Phospho-Ser
  MOD_RES (9)..(9): Modified Cys
  See specification as filed for detailed description of substitutions and preferred embodiments
ILLSESSRCRIRSGNKLGREGRN

SEQ ID NO: 2374 - protein, 23 aa, Artificial Sequence
  Description of Artificial Sequence: Synthetic peptide
  N-term H or Acetyl
  MOD_RES (7)..(7): Ser or Phospho-Ser
  MOD_RES (9)..(9): Modified Cys
  See specification as filed for detailed description of substitutions and preferred embodiments
ILLSESSRCRIRSGNKLGRFGRN

SEQ ID NO: 2375 - protein, 23 aa, Artificial Sequence
  Description of Artificial Sequence: Synthetic peptide
  N-term H or Acetyl
  MOD_RES (7)..(7): Ser or Phospho-Ser
  MOD_RES (9)..(9): Modified Cys
  See specification as filed for detailed description of substitutions and preferred embodiments
ILLSESSRCRIRSGNKLGRGGRN

SEQ ID NO: 2376 - protein, 23 aa, Artificial Sequence
  Description of Artificial Sequence: Synthetic peptide
  N-term H or Acetyl
  MOD_RES (7)..(7): Ser or Phospho-Ser
  MOD_RES (9)..(9): Modified Cys
  See specification as filed for detailed description of substitutions and preferred embodiments
ILLSESSRCRIRSGNKLGRHGRN

SEQ ID NO: 2377 - protein, 23 aa, Artificial Sequence
  Description of Artificial Sequence: Synthetic peptide
  N-term H or Acetyl
  MOD_RES (7)..(7): Ser or Phospho-Ser
  MOD_RES (9)..(9): Modified Cys
  See specification as filed for detailed description of substitutions and preferred embodiments
ILLSESSRCRIRSGNKLGRIGRN

SEQ ID NO: 2378 - protein, 23 aa, Artificial Sequence
  Description of Artificial Sequence: Synthetic peptide
  N-term H or Acetyl
  MOD_RES (7)..(7): Ser or Phospho-Ser
  MOD_RES (9)..(9): Modified Cys
  See specification as filed for detailed description of substitutions and preferred embodiments
ILLSESSRCRIRSGNKLGRKGRN

SEQ ID NO: 2379 - protein, 23 aa, Artificial Sequence
  Description of Artificial Sequence: Synthetic peptide
  N-term H or Acetyl
  MOD_RES (7)..(7): Ser or Phospho-Ser
  MOD_RES (9)..(9): Modified Cys
  See specification as filed for detailed description of substitutions and preferred embodiments
ILLSESSRCRIRSGNKLGRLGRN

SEQ ID NO: 2380 - protein, 23 aa, Artificial Sequence
  Description of Artificial Sequence: Synthetic peptide
  N-term H or Acetyl
  MOD_RES (7)..(7): Ser or Phospho-Ser
  MOD_RES (9)..(9): Modified Cys
  See specification as filed for detailed description of substitutions and preferred embodiments
ILLSESSRCRIRSGNKLGRNGRN

SEQ ID NO: 2381 - protein, 23 aa, Artificial Sequence
  Description of Artificial Sequence: Synthetic peptide
  N-term H or Acetyl
  MOD_RES (7)..(7): Ser or Phospho-Ser
  MOD_RES (9)..(9): Modified Cys
  See specification as filed for detailed description of substitutions and preferred embodiments
ILLSESSRCRIRSGNKLGRPGRN

SEQ ID NO: 2382 - protein, 23 aa, Artificial Sequence
  Description of Artificial Sequence: Synthetic peptide
  N-term H or Acetyl
  MOD_RES (7)..(7): Ser or Phospho-Ser
  MOD_RES (9)..(9): Modified Cys
  See specification as filed for detailed description of substitutions and preferred embodiments
ILLSESSRCRIRSGNKLGRQGRN

SEQ ID NO: 2383 - protein, 23 aa, Artificial Sequence
  Description of Artificial Sequence: Synthetic peptide
  N-term H or Acetyl
  MOD_RES (7)..(7): Ser or Phospho-Ser
  MOD_RES (9)..(9): Modified Cys
  See specification as filed for detailed description of substitutions and preferred embodiments
ILLSESSRCRIRSGNKLGRRGRN

SEQ ID NO: 2384 - protein, 23 aa, Artificial Sequence
  Description of Artificial Sequence: Synthetic peptide
  N-term H or Acetyl
  MOD_RES (7)..(7): Ser or Phospho-Ser
  MOD_RES (9)..(9): Modified Cys
  See specification as filed for detailed description of substitutions and preferred embodiments
ILLSESSRCRIRSGNKLGRVGRN

SEQ ID NO: 2385 - protein, 23 aa, Artificial Sequence
  Description of Artificial Sequence: Synthetic peptide
  N-term H or Acetyl
  MOD_RES (7)..(7): Ser or Phospho-Ser
  MOD_RES (9)..(9): Modified Cys
  See specification as filed for detailed description of substitutions and preferred embodiments
ILLSESSRCRIRSGNKLGRWGRN

SEQ ID NO: 2386 - protein, 19 aa, Artificial Sequence
  Description of Artificial Sequence: Synthetic peptide
  N-term H or Acetyl
  MOD_RES (7)..(7): Ser or Phospho-Ser
  MOD_RES (9)..(9): Modified Cys
  See specification as filed for detailed description of substitutions and preferred embodiments
ILLSESSRCRIRSGNKLGR

SEQ ID NO: 2387 - protein, 23 aa, Artificial Sequence
  Description of Artificial Sequence: Synthetic peptide
  N-term H or Acetyl
  MOD_RES (7)..(7): Ser or Phospho-Ser
  MOD_RES (9)..(9): Modified Cys
  See specification as filed for detailed description of substitutions and preferred embodiments
ILLSESSRCRIRSGNKLGVIGRN

SEQ ID NO: 2388 - protein, 23 aa, Artificial Sequence
  Description of Artificial Sequence: Synthetic peptide
  N-term H or Acetyl
  MOD_RES (7)..(7): Ser or Phospho-Ser
  MOD_RES (9)..(9): Modified Cys
  See specification as filed for detailed description of substitutions and preferred embodiments
ILLSESSRCRIRSGNKLGWIGRN

SEQ ID NO: 2389 - protein, 23 aa, Artificial Sequence
  Description of Artificial Sequence: Synthetic peptide
  N-term H or Acetyl
  MOD_RES (7)..(7): Ser or Phospho-Ser
  MOD_RES (9)..(9): Modified Cys
  See specification as filed for detailed description of substitutions and preferred embodiments
ILLSESSRCRIRSGNKLHRIGRN

SEQ ID NO: 2390 - protein, 23 aa, Artificial Sequence
  Description of Artificial Sequence: Synthetic peptide
  N-term H or Acetyl
  MOD_RES (7)..(7): Ser or Phospho-Ser
  MOD_RES (9)..(9): Modified Cys
  See specification as filed for detailed description of substitutions and preferred embodiments
ILLSESSRCRIRSGNKLIRIGRN

SEQ ID NO: 2391 - protein, 23 aa, Artificial Sequence
  Description of Artificial Sequence: Synthetic peptide
  N-term H or Acetyl
  MOD_RES (7)..(7): Ser or Phospho-Ser
  MOD_RES (9)..(9): Modified Cys
  See specification as filed for detailed description of substitutions and preferred embodiments
ILLSESSRCRIRSGNKLKRIGRN

SEQ ID NO: 2392 - protein, 23 aa, Artificial Sequence
  Description of Artificial Sequence: Synthetic peptide
  N-term H or Acetyl
  MOD_RES (7)..(7): Ser or Phospho-Ser
  MOD_RES (9)..(9): Modified Cys
  See specification as filed for detailed description of substitutions and preferred embodiments
ILLSESSRCRIRSGNKLLRIGRN

SEQ ID NO: 2393 - protein, 23 aa, Artificial Sequence
  Description of Artificial Sequence: Synthetic peptide
  N-term H or Acetyl
  MOD_RES (7)..(7): Ser or Phospho-Ser
  MOD_RES (9)..(9): Modified Cys
  See specification as filed for detailed description of substitutions and preferred embodiments
ILLSESSRCRIRSGNKLNRIGRN

SEQ ID NO: 2394 - protein, 23 aa, Artificial Sequence
  Description of Artificial Sequence: Synthetic peptide
  N-term H or Acetyl
  MOD_RES (7)..(7): Ser or Phospho-Ser
  MOD_RES (9)..(9): Modified Cys
  See specification as filed for detailed description of substitutions and preferred embodiments
ILLSESSRCRIRSGNKLPRIGRN

SEQ ID NO: 2395 - protein, 23 aa, Artificial Sequence
  Description of Artificial Sequence: Synthetic peptide
  N-term H or Acetyl
  MOD_RES (7)..(7): Ser or Phospho-Ser
  MOD_RES (9)..(9): Modified Cys
  See specification as filed for detailed description of substitutions and preferred embodiments
ILLSESSRCRIRSGNKLQRIGRN

SEQ ID NO: 2396 - protein, 23 aa, Artificial Sequence
  Description of Artificial Sequence: Synthetic peptide
  N-term H or Acetyl
  MOD_RES (7)..(7): Ser or Phospho-Ser
  MOD_RES (9)..(9): Modified Cys
  See specification as filed for detailed description of substitutions and preferred embodiments
ILLSESSRCRIRSGNKLRRIGRN

SEQ ID NO: 2397 - protein, 23 aa, Artificial Sequence
  Description of Artificial Sequence: Synthetic peptide
  N-term H or Acetyl
  MOD_RES (7)..(7): Ser or Phospho-Ser
  MOD_RES (9)..(9): Modified Cys
  See specification as filed for detailed description of substitutions and preferred embodiments
ILLSESSRCRIRSGNKLVRIGRN

SEQ ID NO: 2398 - protein, 23 aa, Artificial Sequence
  Description of Artificial Sequence: Synthetic peptide
  N-term H or Acetyl
  MOD_RES (7)..(7): Ser or Phospho-Ser
  MOD_RES (9)..(9): Modified Cys
  See specification as filed for detailed description of substitutions and preferred embodiments
ILLSESSRCRIRSGNKLWRIGRN

SEQ ID NO: 2399 - protein, 23 aa, Artificial Sequence
  Description of Artificial Sequence: Synthetic peptide
  N-term H or Acetyl
  MOD_RES (7)..(7): Ser or Phospho-Ser
  MOD_RES (9)..(9): Modified Cys
  See specification as filed for detailed description of substitutions and preferred embodiments
ILLSESSRCRIRSGNKNGRIGRN

SEQ ID NO: 2400 - protein, 23 aa, Artificial Sequence
  Description of Artificial Sequence: Synthetic peptide
  N-term H or Acetyl
  MOD_RES (7)..(7): Ser or Phospho-Ser
  MOD_RES (9)..(9): Modified Cys
  See specification as filed for detailed description of substitutions and preferred embodiments
ILLSESSRCRIRSGNKPGRIGRN

SEQ ID NO: 2401 - protein, 23 aa, Artificial Sequence
  Description of Artificial Sequence: Synthetic peptide
  N-term H or Acetyl
  MOD_RES (7)..(7): Ser or Phospho-Ser
  MOD_RES (9)..(9): Modified Cys
  See specification as filed for detailed description of substitutions and preferred embodiments
ILLSESSRCRIRSGNKQGRIGRN

SEQ ID NO: 2402 - protein, 23 aa, Artificial Sequence
  Description of Artificial Sequence: Synthetic peptide
  N-term H or Acetyl
  MOD_RES (7)..(7): Ser or Phospho-Ser
  MOD_RES (9)..(9): Modified Cys
  See specification as filed for detailed description of substitutions and preferred embodiments
ILLSESSRCRIRSGNKRGRIGRN

SEQ ID NO: 2403 - protein, 23 aa, Artificial Sequence
  Description of Artificial Sequence: Synthetic peptide
  N-term H or Acetyl
  MOD_RES (7)..(7): Ser or Phospho-Ser
  MOD_RES (9)..(9): Modified Cys
  See specification as filed for detailed description of substitutions and preferred embodiments
ILLSESSRCRIRSGNKVGRIGRN

SEQ ID NO: 2404 - protein, 23 aa, Artificial Sequence
  Description of Artificial Sequence: Synthetic peptide
  N-term H or Acetyl
  MOD_RES (7)..(7): Ser or Phospho-Ser
  MOD_RES (9)..(9): Modified Cys
  See specification as filed for detailed description of substitutions and preferred embodiments
ILLSESSRCRIRSGNKWGRIGRN

SEQ ID NO: 2405 - protein, 23 aa, Artificial Sequence
  Description of Artificial Sequence: Synthetic peptide
  N-term H or Acetyl
  MOD_RES (7)..(7): Ser or Phospho-Ser
  MOD_RES (9)..(9): Modified Cys
  See specification as filed for detailed description of substitutions and preferred embodiments
ILLSESSRCRIRSGNLLGRIGRN

SEQ ID NO: 2406 - protein, 23 aa, Artificial Sequence
  Description of Artificial Sequence: Synthetic peptide
  N-term H or Acetyl
  MOD_RES (7)..(7): Ser or Phospho-Ser
  MOD_RES (9)..(9): Modified Cys
  See specification as filed for detailed description of substitutions and preferred embodiments
ILLSESSRCRIRSGNNLGRIGRN

SEQ ID NO: 2407 - protein, 23 aa, Artificial Sequence
  Description of Artificial Sequence: Synthetic peptide
  N-term H or Acetyl
  MOD_RES (7)..(7): Ser or Phospho-Ser
  MOD_RES (9)..(9): Modified Cys
  See specification as filed for detailed description of substitutions and preferred embodiments
ILLSESSRCRIRSGNPLGRIGRN

SEQ ID NO: 2408 - protein, 23 aa, Artificial Sequence
  Description of Artificial Sequence: Synthetic peptide
  N-term H or Acetyl
  MOD_RES (7)..(7): Ser or Phospho-Ser
  MOD_RES (9)..(9): Modified Cys
  See specification as filed for detailed description of substitutions and preferred embodiments
ILLSESSRCRIRSGNQLGRIGRN

SEQ ID NO: 2409 - protein, 23 aa, Artificial Sequence
  Description of Artificial Sequence: Synthetic peptide
  N-term H or Acetyl
  MOD_RES (7)..(7): Ser or Phospho-Ser
  MOD_RES (9)..(9): Modified Cys
  See specification as filed for detailed description of substitutions and preferred embodiments
ILLSESSRCRIRSGNRLGRIGRN

SEQ ID NO: 2410 - protein, 23 aa, Artificial Sequence
  Description of Artificial Sequence: Synthetic peptide
  N-term H or Acetyl
  MOD_RES (7)..(7): Ser or Phospho-Ser
  MOD_RES (9)..(9): Modified Cys
  See specification as filed for detailed description of substitutions and preferred embodiments
ILLSESSRCRIRSGNVLGRIGRN

SEQ ID NO: 2411 - protein, 23 aa, Artificial Sequence
  Description of Artificial Sequence: Synthetic peptide
  N-term H or Acetyl
  MOD_RES (7)..(7): Ser or Phospho-Ser
  MOD_RES (9)..(9): Modified Cys
  See specification as filed for detailed description of substitutions and preferred embodiments
ILLSESSRCRIRSGNWLGRIGRN

SEQ ID NO: 2412 - protein, 23 aa, Artificial Sequence
  Description of Artificial Sequence: Synthetic peptide
  N-term H or Acetyl
  MOD_RES (7)..(7): Ser or Phospho-Ser
  MOD_RES (9)..(9): Modified Cys
  See specification as filed for detailed description of substitutions and preferred embodiments
ILLSESSRCRIRSGPKLGRIGRN

SEQ ID NO: 2413 - protein, 23 aa, Artificial Sequence
  Description of Artificial Sequence: Synthetic peptide
  N-term H or Acetyl
  MOD_RES (7)..(7): Ser or Phospho-Ser
  MOD_RES (9)..(9): Modified Cys
  See specification as filed for detailed description of substitutions and preferred embodiments
ILLSESSRCRIRSGQKLGRIGRN

SEQ ID NO: 2414 - protein, 23 aa, Artificial Sequence
  Description of Artificial Sequence: Synthetic peptide
  N-term H or Acetyl
  MOD_RES (7)..(7): Ser or Phospho-Ser
  MOD_RES (9)..(9): Modified Cys
  See specification as filed for detailed description of substitutions and preferred embodiments
ILLSESSRCRIRSGRKLGRIGRN

SEQ ID NO: 2415 - protein, 23 aa, Artificial Sequence
  Description of Artificial Sequence: Synthetic peptide
  N-term H or Acetyl
  MOD_RES (7)..(7): Ser or Phospho-Ser
  MOD_RES (9)..(9): Modified Cys
  See specification as filed for detailed description of substitutions and preferred embodiments
ILLSESSRCRIRSGVKLGRIGRN

SEQ ID NO: 2416 - protein, 23 aa, Artificial Sequence
  Description of Artificial Sequence: Synthetic peptide
  N-term H or Acetyl
  MOD_RES (7)..(7): Ser or Phospho-Ser
  MOD_RES (9)..(9): Modified Cys
  See specification as filed for detailed description of substitutions and preferred embodiments
ILLSESSRCRIRSGWKLGRIGRN

SEQ ID NO: 2417 - protein, 23 aa, Artificial Sequence
  Description of Artificial Sequence: Synthetic peptide
  N-term H or Acetyl
  MOD_RES (7)..(7): Ser or Phospho-Ser
  MOD_RES (9)..(9): Modified Cys
  See specification as filed for detailed description of substitutions and preferred embodiments
ILLSESSRCRIRSHNKLGRIGRN

SEQ ID NO: 2418 - protein, 23 aa, Artificial Sequence
  Description of Artificial Sequence: Synthetic peptide
  N-term H or Acetyl
  MOD_RES (7)..(7): Ser or Phospho-Ser
  MOD_RES (9)..(9): Modified Cys
  See specification as filed for detailed description of substitutions and preferred embodiments
ILLSESSRCRIRSINKLGRIGRN

SEQ ID NO: 2419 - protein, 23 aa, Artificial Sequence
  Description of Artificial Sequence: Synthetic peptide
  N-term H or Acetyl
  MOD_RES (7)..(7): Ser or Phospho-Ser
  MOD_RES (9)..(9): Modified Cys
  See specification as filed for detailed description of substitutions and preferred embodiments
ILLSESSRCRIRSKNKLGRIGRN

SEQ ID NO: 2420 - protein, 23 aa, Artificial Sequence
  Description of Artificial Sequence: Synthetic peptide
  N-term H or Acetyl
  MOD_RES (7)..(7): Ser or Phospho-Ser
  MOD_RES (9)..(9): Modified Cys
  See specification as filed for detailed description of substitutions and preferred embodiments
ILLSESSRCRIRSLNKLGRIGRN

SEQ ID NO: 2421 - protein, 23 aa, Artificial Sequence
  Description of Artificial Sequence: Synthetic peptide
  N-term H or Acetyl
  MOD_RES (7)..(7): Ser or Phospho-Ser
  MOD_RES (9)..(9): Modified Cys
  See specification as filed for detailed description of substitutions and preferred embodiments
ILLSESSRCRIRSNNKLGRIGRN

SEQ ID NO: 2422 - protein, 23 aa, Artificial Sequence
  Description of Artificial Sequence: Synthetic peptide
  N-term H or Acetyl
  MOD_RES (7)..(7): Ser or Phospho-Ser
  MOD_RES (9)..(9): Modified Cys
  See specification as filed for detailed description of substitutions and preferred embodiments
ILLSESSRCRIRSPNKLGRIGRN

SEQ ID NO: 2423 - protein, 23 aa, Artificial Sequence
  Description of Artificial Sequence: Synthetic peptide
  N-term H or Acetyl
  MOD_RES (7)..(7): Ser or Phospho-Ser
  MOD_RES (9)..(9): Modified Cys
  See specification as filed for detailed description of substitutions and preferred embodiments
ILLSESSRCRIRSQNKLGRIGRN

SEQ ID NO: 2424 - protein, 23 aa, Artificial Sequence
  Description of Artificial Sequence: Synthetic peptide
  N-term H or Acetyl
  MOD_RES (7)..(7): Ser or Phospho-Ser
  MOD_RES (9)..(9): Modified Cys
  See specification as filed for detailed description of substitutions and preferred embodiments
ILLSESSRCRIRSRNKLGRIGRN

SEQ ID NO: 2425 - protein, 23 aa, Artificial Sequence
  Description of Artificial Sequence: Synthetic peptide
  N-term H or Acetyl
  MOD_RES (7)..(7): Ser or Phospho-Ser
  MOD_RES (9)..(9): Modified Cys
  See specification as filed for detailed description of substitutions and preferred embodiments
ILLSESSRCRIRSVNKLGRIGRN

SEQ ID NO: 2426 - protein, 23 aa, Artificial Sequence
  Description of Artificial Sequence: Synthetic peptide
  N-term H or Acetyl
  MOD_RES (7)..(7): Ser or Phospho-Ser
  MOD_RES (9)..(9): Modified Cys
  See specification as filed for detailed description of substitutions and preferred embodiments
ILLSESSRCRIRSWNKLGRIGRN

SEQ ID NO: 2427 - protein, 23 aa, Artificial Sequence
  Description of Artificial Sequence: Synthetic peptide
  N-term H or Acetyl
  MOD_RES (7)..(7): Ser or Phospho-Ser
  MOD_RES (9)..(9): Modified Cys
  See specification as filed for detailed description of substitutions and preferred embodiments
ILLSESSRCRIRVGNKLGRIGRN

SEQ ID NO: 2428 - protein, 23 aa, Artificial Sequence
  Description of Artificial Sequence: Synthetic peptide
  N-term H or Acetyl
  MOD_RES (7)..(7): Ser or Phospho-Ser
  MOD_RES (9)..(9): Modified Cys
  See specification as filed for detailed description of substitutions and preferred embodiments
ILLSESSRCRIRWGNKLGRIGRN

SEQ ID NO: 2429 - protein, 23 aa, Artificial Sequence
  Description of Artificial Sequence: Synthetic peptide
  N-term H or Acetyl
  MOD_RES (7)..(7): Ser or Phospho-Ser
  MOD_RES (9)..(9): Modified Cys
  See specification as filed for detailed description of substitutions and preferred embodiments
ILLSESSRCRIVSGNKLGRIGRN

SEQ ID NO: 2430 - protein, 23 aa, Artificial Sequence
  Description of Artificial Sequence: Synthetic peptide
  N-term H or Acetyl
  MOD_RES (7)..(7): Ser or Phospho-Ser
  MOD_RES (9)..(9): Modified Cys
  See specification as filed for detailed description of substitutions and preferred embodiments
ILLSESSRCRIWSGNKLGRIGRN

SEQ ID NO: 2431 - protein, 23 aa, Artificial Sequence
  Description of Artificial Sequence: Synthetic peptide
  N-term H or Acetyl
  MOD_RES (7)..(7): Ser or Phospho-Ser
  MOD_RES (9)..(9): Modified Cys
  See specification as filed for detailed description of substitutions and preferred embodiments
ILLSESSRCRKRSGNKLGRIGRN

SEQ ID NO: 2432 - protein, 23 aa, Artificial Sequence
  Description of Artificial Sequence: Synthetic peptide
  N-term H or Acetyl
  MOD_RES (7)..(7): Ser or Phospho-Ser
  MOD_RES (9)..(9): Modified Cys
  See specification as filed for detailed description of substitutions and preferred embodiments
ILLSESSRCRLRSGNKLGRIGRN

SEQ ID NO: 2433 - protein, 23 aa, Artificial Sequence
  Description of Artificial Sequence: Synthetic peptide
  N-term H or Acetyl
  MOD_RES (7)..(7): Ser or Phospho-Ser
  MOD_RES (9)..(9): Modified Cys
  See specification as filed for detailed description of substitutions and preferred embodiments
ILLSESSRCRNRSGNKLGRIGRN

SEQ ID NO: 2434 - protein, 23 aa, Artificial Sequence
  Description of Artificial Sequence: Synthetic peptide
  N-term H or Acetyl
  MOD_RES (7)..(7): Ser or Phospho-Ser
  MOD_RES (9)..(9): Modified Cys
  See specification as filed for detailed description of substitutions and preferred embodiments
ILLSESSRCRPRSGNKLGRIGRN

SEQ ID NO: 2435 - protein, 23 aa, Artificial Sequence
  Description of Artificial Sequence: Synthetic peptide
  N-term H or Acetyl
  MOD_RES (7)..(7): Ser or Phospho-Ser
  MOD_RES (9)..(9): Modified Cys
  See specification as filed for detailed description of substitutions and preferred embodiments
ILLSESSRCRQRSGNKLGRIGRN

SEQ ID NO: 2436 - protein, 23 aa, Artificial Sequence
  Description of Artificial Sequence: Synthetic peptide
  N-term H or Acetyl
  MOD_RES (7)..(7): Ser or Phospho-Ser
  MOD_RES (9)..(9): Modified Cys
  See specification as filed for detailed description of substitutions and preferred embodiments
ILLSESSRCRRRSGNKLGRIGRN

SEQ ID NO: 2437 - protein, 23 aa, Artificial Sequence
  Description of Artificial Sequence: Synthetic peptide
  N-term H or Acetyl
  MOD_RES (7)..(7): Ser or Phospho-Ser
  MOD_RES (9)..(9): Modified Cys
  See specification as filed for detailed description of substitutions and preferred embodiments
ILLSESSRCRVRSGNKLGRIGRN

SEQ ID NO: 2438 - protein, 23 aa, Artificial Sequence
  Description of Artificial Sequence: Synthetic peptide
  N-term H or Acetyl
  MOD_RES (7)..(7): Ser or Phospho-Ser
  MOD_RES (9)..(9): Modified Cys
  See specification as filed for detailed description of substitutions and preferred embodiments
ILLSESSRCRWRSGNKLGRIGRN

SEQ ID NO: 2439 - protein, 23 aa, Artificial Sequence
  Description of Artificial Sequence: Synthetic peptide
  N-term H or Acetyl
  MOD_RES (7)..(7): Ser or Phospho-Ser
  MOD_RES (9)..(9): Modified Cys
  See specification as filed for detailed description of substitutions and preferred embodiments
ILLSESSRCVIRSGNKLGRIGRN

SEQ ID NO: 2440 - protein, 23 aa, Artificial Sequence
  Description of Artificial Sequence: Synthetic peptide
  N-term H or Acetyl
  MOD_RES (7)..(7): Ser or Phospho-Ser
  MOD_RES (9)..(9): Modified Cys
  See specification as filed for detailed description of substitutions and preferred embodiments
ILLSESSRCWIRSGNKLGRIGRN

SEQ ID NO: 2441 - protein, 23 aa, Artificial Sequence
  Description of Artificial Sequence: Synthetic peptide
  N-term H or Acetyl
  MOD_RES (7)..(7): Ser or Phospho-Ser
  MOD_RES (9)..(9): Modified Cys
  See specification as filed for detailed description of substitutions and preferred embodiments
ILLSESSVCRIRSGNKLGRIGRN

SEQ ID NO: 2442 - protein, 23 aa, Artificial Sequence
  Description of Artificial Sequence: Synthetic peptide
  N-term H or Acetyl
  MOD_RES (7)..(7): Ser or Phospho-Ser
  MOD_RES (9)..(9): Modified Cys
  See specification as filed for detailed description of substitutions and preferred embodiments
ILLSESSWCRIRSGNKLGRIGRN

SEQ ID NO: 2443 - protein, 23 aa, Artificial Sequence
  Description of Artificial Sequence: Synthetic peptide
  N-term H or Acetyl
  MOD_RES (7)..(7): Ser or Phospho-Ser
  MOD_RES (9)..(9): Modified Cys
  See specification as filed for detailed description of substitutions and preferred embodiments
ILLSEVSRCRIRSGNKLGRIGRN

SEQ ID NO: 2444 - protein, 23 aa, Artificial Sequence
  Description of Artificial Sequence: Synthetic peptide
  N-term H or Acetyl
  MOD_RES (7)..(7): Ser or Phospho-Ser
  MOD_RES (9)..(9): Modified Cys
  See specification as filed for detailed description of substitutions and preferred embodiments
ILLSEWSRCRIRSGNKLGRIGRN

SEQ ID NO: 2445 - protein, 23 aa, Artificial Sequence
  Description of Artificial Sequence: Synthetic peptide
  N-term H or Acetyl
  MOD_RES (7)..(7): Ser or Phospho-Ser
  MOD_RES (9)..(9): Modified Cys
  See specification as filed for detailed description of substitutions and preferred embodiments
ILLSFSSRCRIRSGNKLGRIGRN

SEQ ID NO: 2446 - protein, 23 aa, Artificial Sequence
  Description of Artificial Sequence: Synthetic peptide
  N-term H or Acetyl
  MOD_RES (7)..(7): Ser or Phospho-Ser
  MOD_RES (9)..(9): Modified Cys
  See specification as filed for detailed description of substitutions and preferred embodiments
ILLSGSSRCRIRSGNKLGRIGRN

SEQ ID NO: 2447 - protein, 23 aa, Artificial Sequence
  Description of Artificial Sequence: Synthetic peptide
  N-term H or Acetyl
  MOD_RES (7)..(7): Ser or Phospho-Ser
  MOD_RES (9)..(9): Modified Cys
  See specification as filed for detailed description of substitutions and preferred embodiments
ILLSHSSRCRIRSGNKLGRIGRN

SEQ ID NO: 2448 - protein, 23 aa, Artificial Sequence
  Description of Artificial Sequence: Synthetic peptide
  N-term H or Acetyl
  MOD_RES (7)..(7): Ser or Phospho-Ser
  MOD_RES (9)..(9): Modified Cys
  See specification as filed for detailed description of substitutions and preferred embodiments
ILLSISSRCRIRSGNKLGRIGRN

SEQ ID NO: 2449 - protein, 23 aa, Artificial Sequence
  Description of Artificial Sequence: Synthetic peptide
  N-term H or Acetyl
  MOD_RES (7)..(7): Ser or Phospho-Ser
  MOD_RES (9)..(9): Modified Cys
  See specification as filed for detailed description of substitutions and preferred embodiments
ILLSKSSRCRIRSGNKLGRIGRN

SEQ ID NO: 2450 - protein, 23 aa, Artificial Sequence
  Description of Artificial Sequence: Synthetic peptide
  N-term H or Acetyl
  MOD_RES (7)..(7): Ser or Phospho-Ser
  MOD_RES (9)..(9): Modified Cys
  See specification as filed for detailed description of substitutions and preferred embodiments
ILLSLSSRCRIRSGNKLGRIGRN

SEQ ID NO: 2451 - protein, 23 aa, Artificial Sequence
  Description of Artificial Sequence: Synthetic peptide
  N-term H or Acetyl
  MOD_RES (7)..(7): Ser or Phospho-Ser
  MOD_RES (9)..(9): Modified Cys
  See specification as filed for detailed description of substitutions and preferred embodiments
ILLSNSSRCRIRSGNKLGRIGRN

SEQ ID NO: 2452 - protein, 23 aa, Artificial Sequence
  Description of Artificial Sequence: Synthetic peptide
  N-term H or Acetyl
  MOD_RES (7)..(7): Ser or Phospho-Ser
  MOD_RES (9)..(9): Modified Cys
  See specification as filed for detailed description of substitutions and preferred embodiments
ILLSPSSRCRIRSGNKLGRIGRN

SEQ ID NO: 2453 - protein, 23 aa, Artificial Sequence
  Description of Artificial Sequence: Synthetic peptide
  N-term H or Acetyl
  MOD_RES (7)..(7): Ser or Phospho-Ser
  MOD_RES (9)..(9): Modified Cys
  See specification as filed for detailed description of substitutions and preferred embodiments
ILLSQSSRCRIRSGNKLGRIGRN

SEQ ID NO: 2454 - protein, 23 aa, Artificial Sequence
  Description of Artificial Sequence: Synthetic peptide
  N-term H or Acetyl
  MOD_RES (7)..(7): Ser or Phospho-Ser
  MOD_RES (9)..(9): Modified Cys
  See specification as filed for detailed description of substitutions and preferred embodiments
ILLSRSSRCRIRSGNKLGRIGRN

SEQ ID NO: 2455 - protein, 23 aa, Artificial Sequence
  Description of Artificial Sequence: Synthetic peptide
  N-term H or Acetyl
  MOD_RES (7)..(7): Ser or Phospho-Ser
  MOD_RES (9)..(9): Modified Cys
  See specification as filed for detailed description of substitutions and preferred embodiments
ILLSVSSRCRIRSGNKLGRIGRN

SEQ ID NO: 2456 - protein, 23 aa, Artificial Sequence
  Description of Artificial Sequence: Synthetic peptide
  N-term H or Acetyl
  MOD_RES (7)..(7): Ser or Phospho-Ser
  MOD_RES (9)..(9): Modified Cys
  See specification as filed for detailed description of substitutions and preferred embodiments
ILLSWSSRCRIRSGNKLGRIGRN

SEQ ID NO: 2457 - protein, 12 aa, Artificial Sequence
  Description of Artificial Sequence: Synthetic peptide
  N-term H or Acetyl
  MOD_RES (5)..(5): Modified Cys
  MOD_RES (7)..(7): Ser or Phospho-Ser
  See specification as filed for detailed description of substitutions and preferred embodiments
ILLVCSSRRIRR

SEQ ID NO: 2458 - protein, 23 aa, Artificial Sequence
  Description of Artificial Sequence: Synthetic peptide
  N-term H or Acetyl
  MOD_RES (7)..(7): Ser or Phospho-Ser
  MOD_RES (9)..(9): Modified Cys
  See specification as filed for detailed description of substitutions and preferred embodiments
ILLVESSRCRIRSGNKLGRIGRN

SEQ ID NO: 2459 - protein, 12 aa, Artificial Sequence
  Description of Artificial Sequence: Synthetic peptide
  N-term H or Acetyl
  MOD_RES (5)..(5): Modified Cys
  MOD_RES (7)..(7): Ser or Phospho-Ser
  See specification as filed for detailed description of substitutions and preferred embodiments
ILLWCSSRRIRR

SEQ ID NO: 2460 - protein, 23 aa, Artificial Sequence
  Description of Artificial Sequence: Synthetic peptide
  N-term H or Acetyl
  MOD_RES (7)..(7): Ser or Phospho-Ser
  MOD_RES (9)..(9): Modified Cys
  See specification as filed for detailed description of substitutions and preferred embodiments
ILLWESSRCRIRSGNKLGRIGRN

SEQ ID NO: 2461 - protein, 12 aa, Artificial Sequence
  Description of Artificial Sequence: Synthetic peptide
  N-term H or Acetyl
  MOD_RES (5)..(5): Modified Cys
  MOD_RES (7)..(7): Ser or Phospho-Ser
  See specification as filed for detailed description of substitutions and preferred embodiments
ILNRCSSRRIRR

SEQ ID NO: 2462 - protein, 12 aa, Artificial Sequence
  Description of Artificial Sequence: Synthetic peptide
  N-term H or Acetyl
  MOD_RES (5)..(5): Modified Cys
  MOD_RES (7)..(7): Ser or Phospho-Ser
  See specification as filed for detailed description of substitutions and preferred embodiments
ILPRCSSRRIRR

SEQ ID NO: 2463 - protein, 21 aa, Artificial Sequence
  Description of Artificial Sequence: Synthetic peptide
  N-term H or Acetyl
  MOD_RES (7)..(7): Modified Cys
  MOD_RES (9)..(9): Thr or Phospho-Thr
  See specification as filed for detailed description of substitutions and preferred embodiments
ILPWWRCYTWVVERDVNTKQR

SEQ ID NO: 2464 - protein, 12 aa, Artificial Sequence
  Description of Artificial Sequence: Synthetic peptide
  N-term H or Acetyl
  MOD_RES (5)..(5): Modified Cys
  MOD_RES (7)..(7): Ser or Phospho-Ser
  See specification as filed for detailed description of substitutions and preferred embodiments
ILQRCSSRRIRR

SEQ ID NO: 2465 - protein, 12 aa, Artificial Sequence
  Description of Artificial Sequence: Synthetic peptide
  N-term H or Acetyl
  MOD_RES (5)..(5): Modified Cys
  MOD_RES (7)..(7): Ser or Phospho-Ser
  See specification as filed for detailed description of substitutions and preferred embodiments
ILRRCSSRRIRR

SEQ ID NO: 2466 - protein, 12 aa, Artificial Sequence
  Description of Artificial Sequence: Synthetic peptide
  N-term H or Acetyl
  MOD_RES (5)..(5): Modified Cys
  MOD_RES (7)..(7): Ser or Phospho-Ser
  See specification as filed for detailed description of substitutions and preferred embodiments
ILVRCSSRRIRR

SEQ ID NO: 2467 - protein, 12 aa, Artificial Sequence
  Description of Artificial Sequence: Synthetic peptide
  N-term H or Acetyl
  MOD_RES (5)..(5): Modified Cys
  MOD_RES (7)..(7): Ser or Phospho-Ser
  See specification as filed for detailed description of substitutions and preferred embodiments
ILWRCSSRRIRR

SEQ ID NO: 2468 - protein, 12 aa, Artificial Sequence
  Description of Artificial Sequence: Synthetic peptide
  N-term H or Acetyl
  MOD_RES (5)..(5): Modified Cys
  MOD_RES (7)..(7): Ser or Phospho-Ser
  See specification as filed for detailed description of substitutions and preferred embodiments
INLRCSSRRIRR

SEQ ID NO: 2469 - protein, 12 aa, Artificial Sequence
  Description of Artificial Sequence: Synthetic peptide
  N-term H or Acetyl
  MOD_RES (5)..(5): Modified Cys
  MOD_RES (7)..(7): Ser or Phospho-Ser
  See specification as filed for detailed description of substitutions and preferred embodiments
IPLRCSSRRIRR

SEQ ID NO: 2470 - protein, 16 aa, Artificial Sequence
  Description of Artificial Sequence: Synthetic peptide
  N-term H or Acetyl
  MOD_RES (4)..(4): Thr or Phospho-Thr
  MOD_RES (6)..(6): Modified Cys
  See specification as filed for detailed description of substitutions and preferred embodiments
IPTTPCTTTYFFFKKK

SEQ ID NO: 2471 - protein, 16 aa, Artificial Sequence
  Description of Artificial Sequence: Synthetic peptide
  N-term H or Acetyl
  MOD_RES (6)..(6): Modified Cys
  MOD_RES (8)..(8): Thr or Phospho-Thr
  See specification as filed for detailed description of substitutions and preferred embodiments
IPTTPCTTTYFFFKKK

SEQ ID NO: 2472 - protein, 12 aa, Artificial Sequence
  Description of Artificial Sequence: Synthetic peptide
  N-term H or Acetyl
  MOD_RES (5)..(5): Modified Cys
  MOD_RES (7)..(7): Ser or Phospho-Ser
  See specification as filed for detailed description of substitutions and preferred embodiments
IQLRCSSRRIRR

SEQ ID NO: 2473 - protein, 15 aa, Artificial Sequence
  Description of Artificial Sequence: Synthetic peptide
  N-term H or Acetyl
  MOD_RES (10)..(10): Ser or Phospho-Ser
  MOD_RES (12)..(12): Modified Cys
  See specification as filed for detailed description of substitutions and preferred embodiments
IQREGFGRQSMCEKR

SEQ ID NO: 2474 - protein, 12 aa, Artificial Sequence
  Description of Artificial Sequence: Synthetic peptide
  N-term H or Acetyl
  MOD_RES (5)..(5): Modified Cys
  MOD_RES (7)..(7): Ser or Phospho-Ser
  See specification as filed for detailed description of substitutions and preferred embodiments
IRLRCSSRRIRR

SEQ ID NO: 2475 - protein, 10 aa, Artificial Sequence
  Description of Artificial Sequence: Synthetic peptide
  N-term H or Acetyl
  MOD_RES (4)..(4): Modified Cys
  MOD_RES (6)..(6): Ser or Phospho-Ser
  See specification as filed for detailed description of substitutions and preferred embodiments
IRRCASFRRR

SEQ ID NO: 2476 - protein, 12 aa, Artificial Sequence
  Description of Artificial Sequence: Synthetic peptide
  N-term H or Acetyl
  MOD_RES (2)..(2): Ser or Phospho-Ser
  MOD_RES (4)..(4): Modified Cys
  MOD_RES (9)..(9): Leu or Nle (i.e. isomer of Leucine)
  See specification as filed for detailed description of substitutions and preferred embodiments
ISGCLSPILTEQ

SEQ ID NO: 2477 - protein, 12 aa, Artificial Sequence
  Description of Artificial Sequence: Synthetic peptide
  N-term H or Acetyl
  MOD_RES (4)..(4): Modified Cys
  MOD_RES (6)..(6): Ser or Phospho-Ser
  MOD_RES (9)..(9): Leu or Nle (i.e. isomer of Leucine)
  See specification as filed for detailed description of substitutions and preferred embodiments
ISGCLSPILTEQ

SEQ ID NO: 2478 - protein, 12 aa, Artificial Sequence
  Description of Artificial Sequence: Synthetic peptide
  N-term H or Acetyl
  MOD_RES (6)..(6): Ser or Phospho-Ser
  MOD_RES (8)..(8): Modified Cys
  MOD_RES (9)..(9): Leu or Nle (i.e. isomer of Leucine)
  See specification as filed for detailed description of substitutions and preferred embodiments
ISGRLSPCLTEQ

SEQ ID NO: 2479 - protein, 12 aa, Artificial Sequence
  Description of Artificial Sequence: Synthetic peptide
  N-term H or Acetyl
  MOD_RES (8)..(8): Modified Cys
  MOD_RES (9)..(9): Leu or Nle (i.e. isomer of Leucine)
  MOD_RES (10)..(10): Thr or Phospho-Thr
  See specification as filed for detailed description of substitutions and preferred embodiments
ISGRLSPCLTEQ

SEQ ID NO: 2480 - protein, 12 aa, Artificial Sequence
  Description of Artificial Sequence: Synthetic peptide
  N-term H or Acetyl
  MOD_RES (5)..(5): Modified Cys
  MOD_RES (7)..(7): Ser or Phospho-Ser
  See specification as filed for detailed description of substitutions and preferred embodiments
IVLRCSSRRIRR

SEQ ID NO: 2481 - protein, 12 aa, Artificial Sequence
  Description of Artificial Sequence: Synthetic peptide
  N-term H or Acetyl
  MOD_RES (5)..(5): Modified Cys
  MOD_RES (7)..(7): Ser or Phospho-Ser
  See specification as filed for detailed description of substitutions and preferred embodiments
IWLRCSSRRIRR

SEQ ID NO: 2482 - protein, 15 aa, Artificial Sequence
  Description of Artificial Sequence: Synthetic peptide
  N-term H or Acetyl
  MOD_RES (2)..(2): Leu or Nle (i.e. isomer of Leucine)
  MOD_RES (8)..(8): Ser or Phospho-Ser
  MOD_RES (10)..(10): Modified Cys
  See specification as filed for detailed description of substitutions and preferred embodiments
KLEVEELSPCALGRF

SEQ ID NO: 2483 - protein, 18 aa, Artificial Sequence
  Description of Artificial Sequence: Synthetic peptide
  N-term H or Acetyl
  MOD_RES (2)..(2): Leu or Nle (i.e. isomer of Leucine)
  MOD_RES (14)..(14): Ser or Phospho-Ser
  MOD_RES (16)..(16): Modified Cys
  See specification as filed for detailed description of substitutions and preferred embodiments
KLKTTKKRPQRATSNCFS

SEQ ID NO: 2484 - protein, 18 aa, Artificial Sequence
  Description of Artificial Sequence: Synthetic peptide
  N-term H or Acetyl
  MOD_RES (2)..(2): Leu or Nle (i.e. isomer of Leucine)
  MOD_RES (16)..(16): Modified Cys
  MOD_RES (18)..(18): Ser or Phospho-Ser
  See specification as filed for detailed description of substitutions and preferred embodiments
KLKTTKKRPQRATSNCFS

SEQ ID NO: 2485 - protein, 15 aa, Artificial Sequence
  Description of Artificial Sequence: Synthetic peptide
  N-term H or Acetyl
  MOD_RES (2)..(2): Leu or Nle (i.e. isomer of Leucine)
  MOD_RES (8)..(8): Thr or Phospho-Thr
  MOD_RES (10)..(10): Modified Cys
  See specification as filed for detailed description of substitutions and preferred embodiments
KLRPQRATSCVFAMF

SEQ ID NO: 2486 - protein, 18 aa, Artificial Sequence
  Description of Artificial Sequence: Synthetic peptide
  N-term H or Acetyl
  MOD_RES (3)..(3): Leu or Nle (i.e. isomer of Leucine)
  MOD_RES (14)..(14): Ser or Phospho-Ser
  MOD_RES (16)..(16): Modified Cys
  See specification as filed for detailed description of substitutions and preferred embodiments
KALTTKKRPQRATSNCFS

SEQ ID NO: 2487 - protein, 18 aa, Artificial Sequence
  Description of Artificial Sequence: Synthetic peptide
  N-term H or Acetyl
  MOD_RES (3)..(3): Leu or Nle (i.e. isomer of Leucine)
  MOD_RES (16)..(16): Modified Cys
  MOD_RES (18)..(18): Ser or Phospho-Ser
  See specification as filed for detailed description of substitutions and preferred embodiments
KALTTKKRPQRATSNCFS

SEQ ID NO: 2488 - protein, 18 aa, Artificial Sequence
  Description of Artificial Sequence: Synthetic peptide
  N-term H or Acetyl
  MOD_RES (14)..(14): Ser or Phospho-Ser
  MOD_RES (16)..(16): Modified Cys
  See specification as filed for detailed description of substitutions and preferred embodiments
KADTTKKRPQRATSNCFS

SEQ ID NO: 2489 - protein, 18 aa, Artificial Sequence
  Description of Artificial Sequence: Synthetic peptide
  N-term H or Acetyl
  MOD_RES (16)..(16): Modified Cys
  MOD_RES (18)..(18): Ser or Phospho-Ser
  See specification as filed for detailed description of substitutions and preferred embodiments
KADTTKKRPQRATSNCFS

SEQ ID NO: 2490 - protein, 18 aa, Artificial Sequence
  Description of Artificial Sequence: Synthetic peptide
  N-term H or Acetyl
  MOD_RES (14)..(14): Ser or Phospho-Ser
  MOD_RES (16)..(16): Modified Cys
  See specification as filed for detailed description of substitutions and preferred embodiments
KAETTKKRPQRATSNCFS

SEQ ID NO: 2491 - protein, 18 aa, Artificial Sequence
  Description of Artificial Sequence: Synthetic peptide
  N-term H or Acetyl
  MOD_RES (16)..(16): Modified Cys
  MOD_RES (18)..(18): Ser or Phospho-Ser
  See specification as filed for detailed description of substitutions and preferred embodiments
KAETTKKRPQRATSNCFS

SEQ ID NO: 2492 - protein, 18 aa, Artificial Sequence
  Description of Artificial Sequence: Synthetic peptide
  N-term H or Acetyl
  MOD_RES (14)..(14): Ser or Phospho-Ser
  MOD_RES (16)..(16): Modified Cys
  See specification as filed for detailed description of substitutions and preferred embodiments
KAFTTKKRPQRATSNCFS

SEQ ID NO: 2493 - protein, 18 aa, Artificial Sequence
  Description of Artificial Sequence: Synthetic peptide
  N-term H or Acetyl
  MOD_RES (16)..(16): Modified Cys
  MOD_RES (18)..(18): Ser or Phospho-Ser
  See specification as filed for detailed description of substitutions and preferred embodiments
KAFTTKKRPQRATSNCFS

SEQ ID NO: 2494 - protein, 18 aa, Artificial Sequence
  Description of Artificial Sequence: Synthetic peptide
  N-term H or Acetyl
  MOD_RES (14)..(14): Ser or Phospho-Ser
  MOD_RES (16)..(16): Modified Cys
  See specification as filed for detailed description of substitutions and preferred embodiments
KAGTTKKRPQRATSNCFS

SEQ ID NO: 2495 - protein, 18 aa, Artificial Sequence
  Description of Artificial Sequence: Synthetic peptide
  N-term H or Acetyl
  MOD_RES (16)..(16): Modified Cys
  MOD_RES (18)..(18): Ser or Phospho-Ser
  See specification as filed for detailed description of substitutions and preferred embodiments
KAGTTKKRPQRATSNCFS

SEQ ID NO: 2496 - protein, 18 aa, Artificial Sequence
  Description of Artificial Sequence: Synthetic peptide
  N-term H or Acetyl
  MOD_RES (14)..(14): Ser or Phospho-Ser
  MOD_RES (16)..(16): Modified Cys
  See specification as filed for detailed description of substitutions and preferred embodiments
KAHTTKKRPQRATSNCFS

SEQ ID NO: 2497 - protein, 18 aa, Artificial Sequence
  Description of Artificial Sequence: Synthetic peptide
  N-term H or Acetyl
  MOD_RES (16)..(16): Modified Cys
  MOD_RES (18)..(18): Ser or Phospho-Ser
  See specification as filed for detailed description of substitutions and preferred embodiments
KAHTTKKRPQRATSNCFS

SEQ ID NO: 2498 - protein, 18 aa, Artificial Sequence
  Description of Artificial Sequence: Synthetic peptide
  N-term H or Acetyl
  MOD_RES (14)..(14): Ser or Phospho-Ser
  MOD_RES (16)..(16): Modified Cys
  See specification as filed for detailed description of substitutions and preferred embodiments
KAITTKKRPQRATSNCFS

SEQ ID NO: 2499 - protein, 18 aa, Artificial Sequence
  Description of Artificial Sequence: Synthetic peptide
  N-term H or Acetyl
  MOD_RES (16)..(16): Modified Cys
  MOD_RES (18)..(18): Ser or Phospho-Ser
  See specification as filed for detailed description of substitutions and preferred embodiments
KAITTKKRPQRATSNCFS

SEQ ID NO: 2500 - protein, 18 aa, Artificial Sequence
  Description of Artificial Sequence: Synthetic peptide
  N-term H or Acetyl
  MOD_RES (4)..(4): Leu or Nle (i.e. isomer of Leucine)
  MOD_RES (14)..(14): Ser or Phospho-Ser
  MOD_RES (16)..(16): Modified Cys
  See specification as filed for detailed description of substitutions and preferred embodiments
KAKLTKKRPQRATSNCFS

SEQ ID NO: 2501 - protein, 18 aa, Artificial Sequence
  Description of Artificial Sequence: Synthetic peptide
  N-term H or Acetyl
  MOD_RES (4)..(4): Leu or Nle (i.e. isomer of Leucine)
  MOD_RES (16)..(16): Modified Cys
  MOD_RES (18)..(18): Ser or Phospho-Ser
  See specification as filed for detailed description of substitutions and preferred embodiments
KAKLTKKRPQRATSNCFS

SEQ ID NO: 2502 - protein, 18 aa, Artificial Sequence
  Description of Artificial Sequence: Synthetic peptide
  N-term H or Acetyl
  MOD_RES (14)..(14): Ser or Phospho-Ser
  MOD_RES (16)..(16): Modified Cys
  See specification as filed for detailed description of substitutions and preferred embodiments
KAKDTKKRPQRATSNCFS

SEQ ID NO: 2503 - protein, 18 aa, Artificial Sequence
  Description of Artificial Sequence: Synthetic peptide
  N-term H or Acetyl
  MOD_RES (16)..(16): Modified Cys
  MOD_RES (18)..(18): Ser or Phospho-Ser
  See specification as filed for detailed description of substitutions and preferred embodiments
KAKDTKKRPQRATSNCFS

SEQ ID NO: 2504 - protein, 18 aa, Artificial Sequence
  Description of Artificial Sequence: Synthetic peptide
  N-term H or Acetyl
  MOD_RES (14)..(14): Ser or Phospho-Ser
  MOD_RES (16)..(16): Modified Cys
  See specification as filed for detailed description of substitutions and preferred embodiments
KAKETKKRPQRATSNCFS

SEQ ID NO: 2505 - protein, 18 aa, Artificial Sequence
  Description of Artificial Sequence: Synthetic peptide
  N-term H or Acetyl
  MOD_RES (16)..(16): Modified Cys
  MOD_RES (18)..(18): Ser or Phospho-Ser
  See specification as filed for detailed description of substitutions and preferred embodiments
KAKETKKRPQRATSNCFS

SEQ ID NO: 2506 - protein, 18 aa, Artificial Sequence
  Description of Artificial Sequence: Synthetic peptide
  N-term H or Acetyl
  MOD_RES (14)..(14): Ser or Phospho-Ser
  MOD_RES (16)..(16): Modified Cys
  See specification as filed for detailed description of substitutions and preferred embodiments
KAKFTKKRPQRATSNCFS

SEQ ID NO: 2507 - protein, 18 aa, Artificial Sequence
  Description of Artificial Sequence: Synthetic peptide
  N-term H or Acetyl
  MOD_RES (16)..(16): Modified Cys
  MOD_RES (18)..(18): Ser or Phospho-Ser
  See specification as filed for detailed description of substitutions and preferred embodiments
KAKFTKKRPQRATSNCFS

SEQ ID NO: 2508 - protein, 18 aa, Artificial Sequence
  Description of Artificial Sequence: Synthetic peptide
  N-term H or Acetyl
  MOD_RES (14)..(14): Ser or Phospho-Ser
  MOD_RES (16)..(16): Modified Cys
  See specification as filed for detailed description of substitutions and preferred embodiments
KAKGTKKRPQRATSNCFS

SEQ ID NO: 2509 - protein, 18 aa, Artificial Sequence
  Description of Artificial Sequence: Synthetic peptide
  N-term H or Acetyl
  MOD_RES (16)..(16): Modified Cys
  MOD_RES (18)..(18): Ser or Phospho-Ser
  See specification as filed for detailed description of substitutions and preferred embodiments
KAKGTKKRPQRATSNCFS

SEQ ID NO: 2510 - protein, 18 aa, Artificial Sequence
  Description of Artificial Sequence: Synthetic peptide
  N-term H or Acetyl
  MOD_RES (14)..(14): Ser or Phospho-Ser
  MOD_RES (16)..(16): Modified Cys
  See specification as filed for detailed description of substitutions and preferred embodiments
KAKHTKKRPQRATSNCFS

SEQ ID NO: 2511 - protein, 18 aa, Artificial Sequence
  Description of Artificial Sequence: Synthetic peptide
  N-term H or Acetyl
  MOD_RES (16)..(16): Modified Cys
  MOD_RES (18)..(18): Ser or Phospho-Ser
  See specification as filed for detailed description of substitutions and preferred embodiments
KAKHTKKRPQRATSNCFS

SEQ ID NO: 2512 - protein, 18 aa, Artificial Sequence
  Description of Artificial Sequence: Synthetic peptide
  N-term H or Acetyl
  MOD_RES (14)..(14): Ser or Phospho-Ser
  MOD_RES (16)..(16): Modified Cys
  See specification as filed for detailed description of substitutions and preferred embodiments
KAKITKKRPQRATSNCFS

SEQ ID NO: 2513 - protein, 18 aa, Artificial Sequence
  Description of Artificial Sequence: Synthetic peptide
  N-term H or Acetyl
  MOD_RES (16)..(16): Modified Cys
  MOD_RES (18)..(18): Ser or Phospho-Ser
  See specification as filed for detailed description of substitutions and preferred embodiments
KAKITKKRPQRATSNCFS

SEQ ID NO: 2514 - protein, 18 aa, Artificial Sequence
  Description of Artificial Sequence: Synthetic peptide
  N-term H or Acetyl
  MOD_RES (14)..(14): Ser or Phospho-Ser
  MOD_RES (16)..(16): Modified Cys
  See specification as filed for detailed description of substitutions and preferred embodiments
KAKKKKKRPQRADSDCFA

SEQ ID NO: 2515 - protein, 18 aa, Artificial Sequence
  Description of Artificial Sequence: Synthetic peptide
  N-term H or Acetyl
  MOD_RES (14)..(14): Ser or Phospho-Ser
  MOD_RES (16)..(16): Modified Cys
  See specification as filed for detailed description of substitutions and preferred embodiments
KAKKKKKRPQRADSDCFS

SEQ ID NO: 2516 - protein, 18 aa, Artificial Sequence
  Description of Artificial Sequence: Synthetic peptide
  N-term H or Acetyl
  MOD_RES (14)..(14): Ser or Phospho-Ser
  MOD_RES (16)..(16): Modified Cys
  See specification as filed for detailed description of substitutions and preferred embodiments
KAKKKKKRPQRADSNCFA

SEQ ID NO: 2517 - protein, 18 aa, Artificial Sequence
  Description of Artificial Sequence: Synthetic peptide
  N-term H or Acetyl
  MOD_RES (14)..(14): Ser or Phospho-Ser
  MOD_RES (16)..(16): Modified Cys
  See specification as filed for detailed description of substitutions and preferred embodiments
KAKKKKKRPQRADSNCFS

SEQ ID NO: 2518 - protein, 18 aa, Artificial Sequence
  Description of Artificial Sequence: Synthetic peptide
  N-term H or Acetyl
  MOD_RES (16)..(16): Modified Cys
  MOD_RES (18)..(18): Ser or Phospho-Ser
  See specification as filed for detailed description of substitutions and preferred embodiments
KAKKKKKRPQRADSDCFS

SEQ ID NO: 2519 - protein, 18 aa, Artificial Sequence
  Description of Artificial Sequence: Synthetic peptide
  N-term H or Acetyl
  MOD_RES (16)..(16): Modified Cys
  MOD_RES (18)..(18): Ser or Phospho-Ser
  See specification as filed for detailed description of substitutions and preferred embodiments
KAKKKKKRPQRADSNCFS

SEQ ID NO: 2520 - protein, 18 aa, Artificial Sequence
  Description of Artificial Sequence: Synthetic peptide
  N-term H or Acetyl
  MOD_RES (14)..(14): Ser or Phospho-Ser
  MOD_RES (16)..(16): Modified Cys
  See specification as filed for detailed description of substitutions and preferred embodiments
KAKKKKKRPQRAESDCFA

SEQ ID NO: 2521 - protein, 18 aa, Artificial Sequence
  Description of Artificial Sequence: Synthetic peptide
  N-term H or Acetyl
  MOD_RES (14)..(14): Ser or Phospho-Ser
  MOD_RES (16)..(16): Modified Cys
  See specification as filed for detailed description of substitutions and preferred embodiments
KAKKKKKRPQRAESDCFS

SEQ ID NO: 2522 - protein, 18 aa, Artificial Sequence
  Description of Artificial Sequence: Synthetic peptide
  N-term H or Acetyl
  MOD_RES (14)..(14): Ser or Phospho-Ser
  MOD_RES (16)..(16): Modified Cys
  See specification as filed for detailed description of substitutions and preferred embodiments
KAKKKKKRPQRAESNCFA

SEQ ID NO: 2523 - protein, 18 aa, Artificial Sequence
  Description of Artificial Sequence: Synthetic peptide
  N-term H or Acetyl
  MOD_RES (14)..(14): Ser or Phospho-Ser
  MOD_RES (16)..(16): Modified Cys
  See specification as filed for detailed description of substitutions and preferred embodiments
KAKKKKKRPQRAESNCFS

SEQ ID NO: 2524 - protein, 18 aa, Artificial Sequence
  Description of Artificial Sequence: Synthetic peptide
  N-term H or Acetyl
  MOD_RES (16)..(16): Modified Cys
  MOD_RES (18)..(18): Ser or Phospho-Ser
  See specification as filed for detailed description of substitutions and preferred embodiments
KAKKKKKRPQRAESDCFS

SEQ ID NO: 2525 - protein, 18 aa, Artificial Sequence
  Description of Artificial Sequence: Synthetic peptide
  N-term H or Acetyl
  MOD_RES (16)..(16): Modified Cys
  MOD_RES (18)..(18): Ser or Phospho-Ser
  See specification as filed for detailed description of substitutions and preferred embodiments
KAKKKKKRPQRAESNCFS

SEQ ID NO: 2526 - protein, 18 aa, Artificial Sequence
  Description of Artificial Sequence: Synthetic peptide
  N-term H or Acetyl
  MOD_RES (14)..(14): Ser or Phospho-Ser
  MOD_RES (16)..(16): Modified Cys
  See specification as filed for detailed description of substitutions and preferred embodiments
KAKKKKKRPQRAHSDCFA

SEQ ID NO: 2527 - protein, 18 aa, Artificial Sequence
  Description of Artificial Sequence: Synthetic peptide
  N-term H or Acetyl
  MOD_RES (14)..(14): Ser or Phospho-Ser
  MOD_RES (16)..(16): Modified Cys
  See specification as filed for detailed description of substitutions and preferred embodiments
KAKKKKKRPQRAHSDCFS

SEQ ID NO: 2528 - protein, 18 aa, Artificial Sequence
  Description of Artificial Sequence: Synthetic peptide
  N-term H or Acetyl
  MOD_RES (14)..(14): Ser or Phospho-Ser
  MOD_RES (16)..(16): Modified Cys
  See specification as filed for detailed description of substitutions and preferred embodiments
KAKKKKKRPQRAHSNCFA

SEQ ID NO: 2529 - protein, 18 aa, Artificial Sequence
  Description of Artificial Sequence: Synthetic peptide
  N-term H or Acetyl
  MOD_RES (14)..(14): Ser or Phospho-Ser
  MOD_RES (16)..(16): Modified Cys
  See specification as filed for detailed description of substitutions and preferred embodiments
KAKKKKKRPQRAHSNCFS

SEQ ID NO: 2530 - protein, 18 aa, Artificial Sequence
  Description of Artificial Sequence: Synthetic peptide
  N-term H or Acetyl
  MOD_RES (16)..(16): Modified Cys
  MOD_RES (18)..(18): Ser or Phospho-Ser
  See specification as filed for detailed description of substitutions and preferred embodiments
KAKKKKKRPQRAHSDCFS

SEQ ID NO: 2531 - protein, 18 aa, Artificial Sequence
  Description of Artificial Sequence: Synthetic peptide
  N-term H or Acetyl
  MOD_RES (16)..(16): Modified Cys
  MOD_RES (18)..(18): Ser or Phospho-Ser
  See specification as filed for detailed description of substitutions and preferred embodiments
KAKKKKKRPQRAHSNCFS

SEQ ID NO: 2532 - protein, 18 aa, Artificial Sequence
  Description of Artificial Sequence: Synthetic peptide
  N-term H or Acetyl
  MOD_RES (14)..(14): Ser or Phospho-Ser
  MOD_RES (16)..(16): Modified Cys
  See specification as filed for detailed description of substitutions and preferred embodiments
KAKKKKKRPQRATSDCFA

SEQ ID NO: 2533 - protein, 18 aa, Artificial Sequence
  Description of Artificial Sequence: Synthetic peptide
  N-term H or Acetyl
  MOD_RES (14)..(14): Ser or Phospho-Ser
  MOD_RES (16)..(16): Modified Cys
  See specification as filed for detailed description of substitutions and preferred embodiments
KAKKKKKRPQRATSDCFS

SEQ ID NO: 2534 - protein, 18 aa, Artificial Sequence
  Description of Artificial Sequence: Synthetic peptide
  N-term H or Acetyl
  MOD_RES (14)..(14): Ser or Phospho-Ser
  MOD_RES (16)..(16): Modified Cys
  See specification as filed for detailed description of substitutions and preferred embodiments
KAKKKKKRPQRATSNCFA

SEQ ID NO: 2535 - protein, 18 aa, Artificial Sequence
  Description of Artificial Sequence: Synthetic peptide
  N-term H or Acetyl
  MOD_RES (14)..(14): Ser or Phospho-Ser
  MOD_RES (16)..(16): Modified Cys
  See specification as filed for detailed description of substitutions and preferred embodiments
KAKKKKKRPQRATSNCFS

SEQ ID NO: 2536 - protein, 18 aa, Artificial Sequence
  Description of Artificial Sequence: Synthetic peptide
  N-term H or Acetyl
  MOD_RES (16)..(16): Modified Cys
  MOD_RES (18)..(18): Ser or Phospho-Ser
  See specification as filed for detailed description of substitutions and preferred embodiments
KAKKKKKRPQRATSDCFS

SEQ ID NO: 2537 - protein, 18 aa, Artificial Sequence
  Description of Artificial Sequence: Synthetic peptide
  N-term H or Acetyl
  MOD_RES (16)..(16): Modified Cys
  MOD_RES (18)..(18): Ser or Phospho-Ser
  See specification as filed for detailed description of substitutions and preferred embodiments
KAKKKKKRPQRATSNCFS

SEQ ID NO: 2538 - protein, 17 aa, Artificial Sequence
  Description of Artificial Sequence: Synthetic peptide
  N-term H or Acetyl
  MOD_RES (11)..(11): Ser or Phospho-Ser
  MOD_RES (13)..(13): Modified Cys
  MOD_RES (16)..(16): Leu or Nle (i.e. isomer of Leucine)
  See specification as filed for detailed description of substitutions and preferred embodiments
KAKKRAGGANSNCFSLF

SEQ ID NO: 2539 - protein, 17 aa, Artificial Sequence
  Description of Artificial Sequence: Synthetic peptide
  N-term H or Acetyl
  MOD_RES (11)..(11): Ser or Phospho-Ser
  MOD_RES (13)..(13): Modified Cys
  See specification as filed for detailed description of substitutions and preferred embodiments
KAKKRAGGANSNCFSMF

SEQ ID NO: 2540 - protein, 15 aa, Artificial Sequence
  Description of Artificial Sequence: Synthetic peptide
  N-term H or Acetyl
  MOD_RES (11)..(11): Ser or Phospho-Ser
  MOD_RES (13)..(13): Modified Cys
  See specification as filed for detailed description of substitutions and preferred embodiments
KAKKRAGGANSNCFS

SEQ ID NO: 2541 - protein, 17 aa, Artificial Sequence
  Description of Artificial Sequence: Synthetic peptide
  N-term H or Acetyl
  MOD_RES (13)..(13): Modified Cys
  MOD_RES (15)..(15): Ser or Phospho-Ser
  MOD_RES (16)..(16): Leu or Nle (i.e. isomer of Leucine)
  See specification as filed for detailed description of substitutions and preferred embodiments
KAKKRAGGANSNCFSLF

SEQ ID NO: 2542 - protein, 17 aa, Artificial Sequence
  Description of Artificial Sequence: Synthetic peptide
  N-term H or Acetyl
  MOD_RES (13)..(13): Modified Cys
  MOD_RES (15)..(15): Ser or Phospho-Ser
  See specification as filed for detailed description of substitutions and preferred embodiments
KAKKRAGGANSNCFSMF

SEQ ID NO: 2543 - protein, 15 aa, Artificial Sequence
  Description of Artificial Sequence: Synthetic peptide
  N-term H or Acetyl
  MOD_RES (13)..(13): Modified Cys
  MOD_RES (15)..(15): Ser or Phospho-Ser
  See specification as filed for detailed description of substitutions and preferred embodiments
KAKKRAGGANSNCFS

SEQ ID NO: 2544 - protein, 19 aa, Artificial Sequence
  Description of Artificial Sequence: Synthetic peptide
  N-term H or Acetyl
  MOD_RES (15)..(15): Ser or Phospho-Ser
  MOD_RES (16)..(16): Leu or Nle (i.e. isomer of Leucine)
  MOD_RES (17)..(17): Modified Cys
  See specification as filed for detailed description of substitutions and preferred embodiments
KAKKRAGGANSNVFSLCEQ

SEQ ID NO: 2545 - protein, 17 aa, Artificial Sequence
  Description of Artificial Sequence: Synthetic peptide
  N-term H or Acetyl
  MOD_RES (15)..(15): Ser or Phospho-Ser
  MOD_RES (16)..(16): Leu or Nle (i.e. isomer of Leucine)
  MOD_RES (17)..(17): Modified Cys
  See specification as filed for detailed description of substitutions and preferred embodiments
KAKKRAGGANSNVFSLC

SEQ ID NO: 2546 - protein, 19 aa, Artificial Sequence
  Description of Artificial Sequence: Synthetic peptide
  N-term H or Acetyl
  MOD_RES (15)..(15): Ser or Phospho-Ser
  MOD_RES (17)..(17): Modified Cys
  See specification as filed for detailed description of substitutions and preferred embodiments
KAKKRAGGANSNVFSMCEQ

SEQ ID NO: 2547 - protein, 17 aa, Artificial Sequence
  Description of Artificial Sequence: Synthetic peptide
  N-term H or Acetyl
  MOD_RES (15)..(15): Ser or Phospho-Ser
  MOD_RES (17)..(17): Modified Cys
  See specification as filed for detailed description of substitutions and preferred embodiments
KAKKRAGGANSNVFSMC

SEQ ID NO: 2548 - protein, 17 aa, Artificial Sequence
  Description of Artificial Sequence: Synthetic peptide
  N-term H or Acetyl
  MOD_RES (9)..(9): Modified Cys
  MOD_RES (11)..(11): Ser or Phospho-Ser
  MOD_RES (16)..(16): Leu or Nle (i.e. isomer of Leucine)
  See specification as filed for detailed description of substitutions and preferred embodiments
KAKKRAGGCNSNVFSLF

SEQ ID NO: 2549 - protein, 17 aa, Artificial Sequence
  Description of Artificial Sequence: Synthetic peptide
  N-term H or Acetyl
  MOD_RES (9)..(9): Modified Cys
  MOD_RES (11)..(11): Ser or Phospho-Ser
  See specification as filed for detailed description of substitutions and preferred embodiments
KAKKRAGGCNSNVFSMF

SEQ ID NO: 2550 - protein, 15 aa, Artificial Sequence
  Description of Artificial Sequence: Synthetic peptide
  N-term H or Acetyl
  MOD_RES (9)..(9): Modified Cys
  MOD_RES (11)..(11): Ser or Phospho-Ser
  See specification as filed for detailed description of substitutions and preferred embodiments
KAKKRAGGCNSNVFS

SEQ ID NO: 2551 - protein, 18 aa, Artificial Sequence
  Description of Artificial Sequence: Synthetic peptide
  N-term H or Acetyl
  MOD_RES (14)..(14): Ser or Phospho-Ser
  MOD_RES (16)..(16): Modified Cys
  See specification as filed for detailed description of substitutions and preferred embodiments
KAKKRKKRPQRADSDCFA

SEQ ID NO: 2552 - protein, 18 aa, Artificial Sequence
  Description of Artificial Sequence: Synthetic peptide
  N-term H or Acetyl
  MOD_RES (14)..(14): Ser or Phospho-Ser
  MOD_RES (16)..(16): Modified Cys
  See specification as filed for detailed description of substitutions and preferred embodiments
KAKKRKKRPQRADSDCFS

SEQ ID NO: 2553 - protein, 18 aa, Artificial Sequence
  Description of Artificial Sequence: Synthetic peptide
  N-term H or Acetyl
  MOD_RES (14)..(14): Ser or Phospho-Ser
  MOD_RES (16)..(16): Modified Cys
  See specification as filed for detailed description of substitutions and preferred embodiments
KAKKRKKRPQRADSNCFA

SEQ ID NO: 2554 - protein, 18 aa, Artificial Sequence
  Description of Artificial Sequence: Synthetic peptide
  N-term H or Acetyl
  MOD_RES (14)..(14): Ser or Phospho-Ser
  MOD_RES (16)..(16): Modified Cys
  See specification as filed for detailed description of substitutions and preferred embodiments
KAKKRKKRPQRADSNCFS

SEQ ID NO: 2555 - protein, 18 aa, Artificial Sequence
  Description of Artificial Sequence: Synthetic peptide
  N-term H or Acetyl
  MOD_RES (16)..(16): Modified Cys
  MOD_RES (18)..(18): Ser or Phospho-Ser
  See specification as filed for detailed description of substitutions and preferred embodiments
KAKKRKKRPQRADSDCFS

SEQ ID NO: 2556 - protein, 18 aa, Artificial Sequence
  Description of Artificial Sequence: Synthetic peptide
  N-term H or Acetyl
  MOD_RES (16)..(16): Modified Cys
  MOD_RES (18)..(18): Ser or Phospho-Ser
  See specification as filed for detailed description of substitutions and preferred embodiments
KAKKRKKRPQRADSNCFS

SEQ ID NO: 2557 - protein, 18 aa, Artificial Sequence
  Description of Artificial Sequence: Synthetic peptide
  N-term H or Acetyl
  MOD_RES (14)..(14): Ser or Phospho-Ser
  MOD_RES (16)..(16): Modified Cys
  See specification as filed for detailed description of substitutions and preferred embodiments
KAKKRKKRPQRAESDCFA

SEQ ID NO: 2558 - protein, 18 aa, Artificial Sequence
  Description of Artificial Sequence: Synthetic peptide
  N-term H or Acetyl
  MOD_RES (14)..(14): Ser or Phospho-Ser
  MOD_RES (16)..(16): Modified Cys
  See specification as filed for detailed description of substitutions and preferred embodiments
KAKKRKKRPQRAESDCFS

SEQ ID NO: 2559 - protein, 18 aa, Artificial Sequence
  Description of Artificial Sequence: Synthetic peptide
  N-term H or Acetyl
  MOD_RES (14)..(14): Ser or Phospho-Ser
  MOD_RES (16)..(16): Modified Cys
  See specification as filed for detailed description of substitutions and preferred embodiments
KAKKRKKRPQRAESNCFA

SEQ ID NO: 2560 - protein, 18 aa, Artificial Sequence
  Description of Artificial Sequence: Synthetic peptide
  N-term H or Acetyl
  MOD_RES (14)..(14): Ser or Phospho-Ser
  MOD_RES (16)..(16): Modified Cys
  See specification as filed for detailed description of substitutions and preferred embodiments
KAKKRKKRPQRAESNCFS

SEQ ID NO: 2561 - protein, 18 aa, Artificial Sequence
  Description of Artificial Sequence: Synthetic peptide
  N-term H or Acetyl
  MOD_RES (16)..(16): Modified Cys
  MOD_RES (18)..(18): Ser or Phospho-Ser
  See specification as filed for detailed description of substitutions and preferred embodiments
KAKKRKKRPQRAESDCFS

SEQ ID NO: 2562 - protein, 18 aa, Artificial Sequence
  Description of Artificial Sequence: Synthetic peptide
  N-term H or Acetyl
  MOD_RES (16)..(16): Modified Cys
  MOD_RES (18)..(18): Ser or Phospho-Ser
  See specification as filed for detailed description of substitutions and preferred embodiments
KAKKRKKRPQRAESNCFS

SEQ ID NO: 2563 - protein, 18 aa, Artificial Sequence
  Description of Artificial Sequence: Synthetic peptide
  N-term H or Acetyl
  MOD_RES (14)..(14): Ser or Phospho-Ser
  MOD_RES (16)..(16): Modified Cys
  See specification as filed for detailed description of substitutions and preferred embodiments
KAKKRKKRPQRAHSDCFA

SEQ ID NO: 2564 - protein, 18 aa, Artificial Sequence
  Description of Artificial Sequence: Synthetic peptide
  N-term H or Acetyl
  MOD_RES (14)..(14): Ser or Phospho-Ser
  MOD_RES (16)..(16): Modified Cys
  See specification as filed for detailed description of substitutions and preferred embodiments
KAKKRKKRPQRAHSDCFS

SEQ ID NO: 2565 - protein, 18 aa, Artificial Sequence
  Description of Artificial Sequence: Synthetic peptide
  N-term H or Acetyl
  MOD_RES (14)..(14): Ser or Phospho-Ser
  MOD_RES (16)..(16): Modified Cys
  See specification as filed for detailed description of substitutions and preferred embodiments
KAKKRKKRPQRAHSNCFA

SEQ ID NO: 2566 - protein, 18 aa, Artificial Sequence
  Description of Artificial Sequence: Synthetic peptide
  N-term H or Acetyl
  MOD_RES (14)..(14): Ser or Phospho-Ser
  MOD_RES (16)..(16): Modified Cys
  See specification as filed for detailed description of substitutions and preferred embodiments
KAKKRKKRPQRAHSNCFS

SEQ ID NO: 2567 - protein, 18 aa, Artificial Sequence
  Description of Artificial Sequence: Synthetic peptide
  N-term H or Acetyl
  MOD_RES (16)..(16): Modified Cys
  MOD_RES (18)..(18): Ser or Phospho-Ser
  See specification as filed for detailed description of substitutions and preferred embodiments
KAKKRKKRPQRAHSDCFS

SEQ ID NO: 2568 - protein, 18 aa, Artificial Sequence
  Description of Artificial Sequence: Synthetic peptide
  N-term H or Acetyl
  MOD_RES (16)..(16): Modified Cys
  MOD_RES (18)..(18): Ser or Phospho-Ser
  See specification as filed for detailed description of substitutions and preferred embodiments
KAKKRKKRPQRAHSNCFS

SEQ ID NO: 2569 - protein, 18 aa, Artificial Sequence
  Description of Artificial Sequence: Synthetic peptide
  N-term H or Acetyl
  MOD_RES (14)..(14): Ser or Phospho-Ser
  MOD_RES (16)..(16): Modified Cys
  See specification as filed for detailed description of substitutions and preferred embodiments
KAKKRKKRPQRATSDCFA

SEQ ID NO: 2570 - protein, 18 aa, Artificial Sequence
  Description of Artificial Sequence: Synthetic peptide
  N-term H or Acetyl
  MOD_RES (14)..(14): Ser or Phospho-Ser
  MOD_RES (16)..(16): Modified Cys
  See specification as filed for detailed description of substitutions and preferred embodiments
KAKKRKKRPQRATSDCFS

SEQ ID NO: 2571 - protein, 18 aa, Artificial Sequence
  Description of Artificial Sequence: Synthetic peptide
  N-term H or Acetyl
  MOD_RES (14)..(14): Ser or Phospho-Ser
  MOD_RES (16)..(16): Modified Cys
  See specification as filed for detailed description of substitutions and preferred embodiments
KAKKRKKRPQRATSNCFA

SEQ ID NO: 2572 - protein, 18 aa, Artificial Sequence
  Description of Artificial Sequence: Synthetic peptide
  N-term H or Acetyl
  MOD_RES (14)..(14): Ser or Phospho-Ser
  MOD_RES (16)..(16): Modified Cys
  See specification as filed for detailed description of substitutions and preferred embodiments
KAKKRKKRPQRATSNCFS

SEQ ID NO: 2573 - protein, 18 aa, Artificial Sequence
  Description of Artificial Sequence: Synthetic peptide
  N-term H or Acetyl
  MOD_RES (16)..(16): Modified Cys
  MOD_RES (18)..(18): Ser or Phospho-Ser
  See specification as filed for detailed description of substitutions and preferred embodiments
KAKKRKKRPQRATSDCFS

SEQ ID NO: 2574 - protein, 18 aa, Artificial Sequence
  Description of Artificial Sequence: Synthetic peptide
  N-term H or Acetyl
  MOD_RES (16)..(16): Modified Cys
  MOD_RES (18)..(18): Ser or Phospho-Ser
  See specification as filed for detailed description of substitutions and preferred embodiments
KAKKRKKRPQRATSNCFS

SEQ ID NO: 2575 - protein, 18 aa, Artificial Sequence
  Description of Artificial Sequence: Synthetic peptide
  N-term H or Acetyl
  MOD_RES (14)..(14): Ser or Phospho-Ser
  MOD_RES (16)..(16): Modified Cys
  See specification as filed for detailed description of substitutions and preferred embodiments
KAKKTKKRPQRADSDCFA

SEQ ID NO: 2576 - protein, 18 aa, Artificial Sequence
  Description of Artificial Sequence: Synthetic peptide
  N-term H or Acetyl
  MOD_RES (14)..(14): Ser or Phospho-Ser
  MOD_RES (16)..(16): Modified Cys
  See specification as filed for detailed description of substitutions and preferred embodiments
KAKKTKKRPQRADSDCFS

SEQ ID NO: 2577 - protein, 18 aa, Artificial Sequence
  Description of Artificial Sequence: Synthetic peptide
  N-term H or Acetyl
  MOD_RES (14)..(14): Ser or Phospho-Ser
  MOD_RES (16)..(16): Modified Cys
  See specification as filed for detailed description of substitutions and preferred embodiments
KAKKTKKRPQRADSNCFA

SEQ ID NO: 2578 - protein, 18 aa, Artificial Sequence
  Description of Artificial Sequence: Synthetic peptide
  N-term H or Acetyl
  MOD_RES (14)..(14): Ser or Phospho-Ser
  MOD_RES (16)..(16): Modified Cys
  See specification as filed for detailed description of substitutions and preferred embodiments
KAKKTKKRPQRADSNCFS

SEQ ID NO: 2579 - protein, 18 aa, Artificial Sequence
  Description of Artificial Sequence: Synthetic peptide
  N-term H or Acetyl
  MOD_RES (16)..(16): Modified Cys
  MOD_RES (18)..(18): Ser or Phospho-Ser
  See specification as filed for detailed description of substitutions and preferred embodiments
KAKKTKKRPQRADSDCFS

SEQ ID NO: 2580 - protein, 18 aa, Artificial Sequence
  Description of Artificial Sequence: Synthetic peptide
  N-term H or Acetyl
  MOD_RES (16)..(16): Modified Cys
  MOD_RES (18)..(18): Ser or Phospho-Ser
  See specification as filed for detailed description of substitutions and preferred embodiments
KAKKTKKRPQRADSNCFS

SEQ ID NO: 2581 - protein, 18 aa, Artificial Sequence
  Description of Artificial Sequence: Synthetic peptide
  N-term H or Acetyl
  MOD_RES (14)..(14): Ser or Phospho-Ser
  MOD_RES (16)..(16): Modified Cys
  See specification as filed for detailed description of substitutions and preferred embodiments
KAKKTKKRPQRAESDCFA

SEQ ID NO: 2582 - protein, 18 aa, Artificial Sequence
  Description of Artificial Sequence: Synthetic peptide
  N-term H or Acetyl
  MOD_RES (14)..(14): Ser or Phospho-Ser
  MOD_RES (16)..(16): Modified Cys
  See specification as filed for detailed description of substitutions and preferred embodiments
KAKKTKKRPQRAESDCFS

SEQ ID NO: 2583 - protein, 18 aa, Artificial Sequence
  Description of Artificial Sequence: Synthetic peptide
  N-term H or Acetyl
  MOD_RES (14)..(14): Ser or Phospho-Ser
  MOD_RES (16)..(16): Modified Cys
  See specification as filed for detailed description of substitutions and preferred embodiments
KAKKTKKRPQRAESNCFA

SEQ ID NO: 2584 - protein, 18 aa, Artificial Sequence
  Description of Artificial Sequence: Synthetic peptide
  N-term H or Acetyl
  MOD_RES (14)..(14): Ser or Phospho-Ser
  MOD_RES (16)..(16): Modified Cys
  See specification as filed for detailed description of substitutions and preferred embodiments
KAKKTKKRPQRAESNCFS

SEQ ID NO: 2585 - protein, 18 aa, Artificial Sequence
  Description of Artificial Sequence: Synthetic peptide
  N-term H or Acetyl
  MOD_RES (16)..(16): Modified Cys
  MOD_RES (18)..(18): Ser or Phospho-Ser
  See specification as filed for detailed description of substitutions and preferred embodiments
KAKKTKKRPQRAESDCFS

SEQ ID NO: 2586 - protein, 18 aa, Artificial Sequence
  Description of Artificial Sequence: Synthetic peptide
  N-term H or Acetyl
  MOD_RES (16)..(16): Modified Cys
  MOD_RES (18)..(18): Ser or Phospho-Ser
  See specification as filed for detailed description of substitutions and preferred embodiments
KAKKTKKRPQRAESNCFS

SEQ ID NO: 2587 - protein, 18 aa, Artificial Sequence
  Description of Artificial Sequence: Synthetic peptide
  N-term H or Acetyl
  MOD_RES (14)..(14): Ser or Phospho-Ser
  MOD_RES (16)..(16): Modified Cys
  See specification as filed for detailed description of substitutions and preferred embodiments
KAKKTKKRPQRAHSDCFA

SEQ ID NO: 2588 - protein, 18 aa, Artificial Sequence
  Description of Artificial Sequence: Synthetic peptide
  N-term H or Acetyl
  MOD_RES (14)..(14): Ser or Phospho-Ser
  MOD_RES (16)..(16): Modified Cys
  See specification as filed for detailed description of substitutions and preferred embodiments
KAKKTKKRPQRAHSDCFS

SEQ ID NO: 2589 - protein, 18 aa, Artificial Sequence
  Description of Artificial Sequence: Synthetic peptide
  N-term H or Acetyl
  MOD_RES (14)..(14): Ser or Phospho-Ser
  MOD_RES (16)..(16): Modified Cys
  See specification as filed for detailed description of substitutions and preferred embodiments
KAKKTKKRPQRAHSNCFA

SEQ ID NO: 2590 - protein, 18 aa, Artificial Sequence
  Description of Artificial Sequence: Synthetic peptide
  N-term H or Acetyl
  MOD_RES (14)..(14): Ser or Phospho-Ser
  MOD_RES (16)..(16): Modified Cys
  See specification as filed for detailed description of substitutions and preferred embodiments
KAKKTKKRPQRAHSNCFS

SEQ ID NO: 2591 - protein, 18 aa, Artificial Sequence
  Description of Artificial Sequence: Synthetic peptide
  N-term H or Acetyl
  MOD_RES (16)..(16): Modified Cys
  MOD_RES (18)..(18): Ser or Phospho-Ser
  See specification as filed for detailed description of substitutions and preferred embodiments
KAKKTKKRPQRAHSDCFS

SEQ ID NO: 2592 - protein, 18 aa, Artificial Sequence
  Description of Artificial Sequence: Synthetic peptide
  N-term H or Acetyl
  MOD_RES (16)..(16): Modified Cys
  MOD_RES (18)..(18): Ser or Phospho-Ser
  See specification as filed for detailed description of substitutions and preferred embodiments
KAKKTKKRPQRAHSNCFS

SEQ ID NO: 2593 - protein, 18 aa, Artificial Sequence
  Description of Artificial Sequence: Synthetic peptide
  N-term H or Acetyl
  MOD_RES (14)..(14): Ser or Phospho-Ser
  MOD_RES (16)..(16): Modified Cys
  See specification as filed for detailed description of substitutions and preferred embodiments
KAKKTKKRPQRATSDCFA

SEQ ID NO: 2594 - protein, 18 aa, Artificial Sequence
  Description of Artificial Sequence: Synthetic peptide
  N-term H or Acetyl
  MOD_RES (14)..(14): Ser or Phospho-Ser
  MOD_RES (16)..(16): Modified Cys
  See specification as filed for detailed description of substitutions and preferred embodiments
KAKKTKKRPQRATSDCFS

SEQ ID NO: 2595 - protein, 18 aa, Artificial Sequence
  Description of Artificial Sequence: Synthetic peptide
  N-term H or Acetyl
  MOD_RES (14)..(14): Ser or Phospho-Ser
  MOD_RES (16)..(16): Modified Cys
  See specification as filed for detailed description of substitutions and preferred embodiments
KAKKTKKRPQRATSNCFA

SEQ ID NO: 2596 - protein, 18 aa, Artificial Sequence
  Description of Artificial Sequence: Synthetic peptide
  N-term H or Acetyl
  MOD_RES (14)..(14): Ser or Phospho-Ser
  MOD_RES (16)..(16): Modified Cys
  See specification as filed for detailed description of substitutions and preferred embodiments
KAKKTKKRPQRATSNCFS

SEQ ID NO: 2597 - protein, 18 aa, Artificial Sequence
  Description of Artificial Sequence: Synthetic peptide
  N-term H or Acetyl
  MOD_RES (16)..(16): Modified Cys
  MOD_RES (18)..(18): Ser or Phospho-Ser
  See specification as filed for detailed description of substitutions and preferred embodiments
KAKKTKKRPQRATSDCFS

SEQ ID NO: 2598 - protein, 18 aa, Artificial Sequence
  Description of Artificial Sequence: Synthetic peptide
  N-term H or Acetyl
  MOD_RES (16)..(16): Modified Cys
  MOD_RES (18)..(18): Ser or Phospho-Ser
  See specification as filed for detailed description of substitutions and preferred embodiments
KAKKTKKRPQRATSNCFS

SEQ ID NO: 2599 - protein, 18 aa, Artificial Sequence
  Description of Artificial Sequence: Synthetic peptide
  N-term H or Acetyl
  MOD_RES (14)..(14): Ser or Phospho-Ser
  MOD_RES (16)..(16): Modified Cys
  See specification as filed for detailed description of substitutions and preferred embodiments
KAKKVKKRPQRADSDCFA

SEQ ID NO: 2600 - protein, 18 aa, Artificial Sequence
  Description of Artificial Sequence: Synthetic peptide
  N-term H or Acetyl
  MOD_RES (14)..(14): Ser or Phospho-Ser
  MOD_RES (16)..(16): Modified Cys
  See specification as filed for detailed description of substitutions and preferred embodiments
KAKKVKKRPQRADSDCFS

SEQ ID NO: 2601 - protein, 18 aa, Artificial Sequence
  Description of Artificial Sequence: Synthetic peptide
  N-term H or Acetyl
  MOD_RES (14)..(14): Ser or Phospho-Ser
  MOD_RES (16)..(16): Modified Cys
  See specification as filed for detailed description of substitutions and preferred embodiments
KAKKVKKRPQRADSNCFA

SEQ ID NO: 2602 - protein, 18 aa, Artificial Sequence
  Description of Artificial Sequence: Synthetic peptide
  N-term H or Acetyl
  MOD_RES (14)..(14): Ser or Phospho-Ser
  MOD_RES (16)..(16): Modified Cys
  See specification as filed for detailed description of substitutions and preferred embodiments
KAKKVKKRPQRADSNCFS

SEQ ID NO: 2603 - protein, 18 aa, Artificial Sequence
  Description of Artificial Sequence: Synthetic peptide
  N-term H or Acetyl
  MOD_RES (16)..(16): Modified Cys
  MOD_RES (18)..(18): Ser or Phospho-Ser
  See specification as filed for detailed description of substitutions and preferred embodiments
KAKKVKKRPQRADSDCFS

SEQ ID NO: 2604 - protein, 18 aa, Artificial Sequence
  Description of Artificial Sequence: Synthetic peptide
  N-term H or Acetyl
  MOD_RES (16)..(16): Modified Cys
  MOD_RES (18)..(18): Ser or Phospho-Ser
  See specification as filed for detailed description of substitutions and preferred embodiments
KAKKVKKRPQRADSNCFS

SEQ ID NO: 2605 - protein, 18 aa, Artificial Sequence
  Description of Artificial Sequence: Synthetic peptide
  N-term H or Acetyl
  MOD_RES (14)..(14): Ser or Phospho-Ser
  MOD_RES (16)..(16): Modified Cys
  See specification as filed for detailed description of substitutions and preferred embodiments
KAKKVKKRPQRAESDCFA

SEQ ID NO: 2606 - protein, 18 aa, Artificial Sequence
  Description of Artificial Sequence: Synthetic peptide
  N-term H or Acetyl
  MOD_RES (14)..(14): Ser or Phospho-Ser
  MOD_RES (16)..(16): Modified Cys
  See specification as filed for detailed description of substitutions and preferred embodiments
KAKKVKKRPQRAESDCFS

SEQ ID NO: 2607 - protein, 18 aa, Artificial Sequence
  Description of Artificial Sequence: Synthetic peptide
  N-term H or Acetyl
  MOD_RES (14)..(14): Ser or Phospho-Ser
  MOD_RES (16)..(16): Modified Cys
  See specification as filed for detailed description of substitutions and preferred embodiments
KAKKVKKRPQRAESNCFA

SEQ ID NO: 2608 - protein, 18 aa, Artificial Sequence
  Description of Artificial Sequence: Synthetic peptide
  N-term H or Acetyl
  MOD_RES (14)..(14): Ser or Phospho-Ser
  MOD_RES (16)..(16): Modified Cys
  See specification as filed for detailed description of substitutions and preferred embodiments
KAKKVKKRPQRAESNCFS

SEQ ID NO: 2609 - protein, 18 aa, Artificial Sequence
  Description of Artificial Sequence: Synthetic peptide
  N-term H or Acetyl
  MOD_RES (16)..(16): Modified Cys
  MOD_RES (18)..(18): Ser or Phospho-Ser
  See specification as filed for detailed description of substitutions and preferred embodiments
KAKKVKKRPQRAESDCFS

SEQ ID NO: 2610 - protein, 18 aa, Artificial Sequence
  Description of Artificial Sequence: Synthetic peptide
  N-term H or Acetyl
  MOD_RES (16)..(16): Modified Cys
  MOD_RES (18)..(18): Ser or Phospho-Ser
  See specification as filed for detailed description of substitutions and preferred embodiments
KAKKVKKRPQRAESNCFS

SEQ ID NO: 2611 - protein, 18 aa, Artificial Sequence
  Description of Artificial Sequence: Synthetic peptide
  N-term H or Acetyl
  MOD_RES (14)..(14): Ser or Phospho-Ser
  MOD_RES (16)..(16): Modified Cys
  See specification as filed for detailed description of substitutions and preferred embodiments
KAKKVKKRPQRAHSDCFA

SEQ ID NO: 2612 - protein, 18 aa, Artificial Sequence
  Description of Artificial Sequence: Synthetic peptide
  N-term H or Acetyl
  MOD_RES (14)..(14): Ser or Phospho-Ser
  MOD_RES (16)..(16): Modified Cys
  See specification as filed for detailed description of substitutions and preferred embodiments
KAKKVKKRPQRAHSDCFS

SEQ ID NO: 2613 - protein, 18 aa, Artificial Sequence
  Description of Artificial Sequence: Synthetic peptide
  N-term H or Acetyl
  MOD_RES (14)..(14): Ser or Phospho-Ser
  MOD_RES (16)..(16): Modified Cys
  See specification as filed for detailed description of substitutions and preferred embodiments
KAKKVKKRPQRAHSNCFA

SEQ ID NO: 2614 - protein, 18 aa, Artificial Sequence
  Description of Artificial Sequence: Synthetic peptide
  N-term H or Acetyl
  MOD_RES (14)..(14): Ser or Phospho-Ser
  MOD_RES (16)..(16): Modified Cys
  See specification as filed for detailed description of substitutions and preferred embodiments
KAKKVKKRPQRAHSNCFS

SEQ ID NO: 2615 - protein, 18 aa, Artificial Sequence
  Description of Artificial Sequence: Synthetic peptide
  N-term H or Acetyl
  MOD_RES (16)..(16): Modified Cys
  MOD_RES (18)..(18): Ser or Phospho-Ser
  See specification as filed for detailed description of substitutions and preferred embodiments
KAKKVKKRPQRAHSDCFS

SEQ ID NO: 2616 - protein, 18 aa, Artificial Sequence
  Description of Artificial Sequence: Synthetic peptide
  N-term H or Acetyl
  MOD_RES (16)..(16): Modified Cys
  MOD_RES (18)..(18): Ser or Phospho-Ser
  See specification as filed for detailed description of substitutions and preferred embodiments
KAKKVKKRPQRAHSNCFS

SEQ ID NO: 2617 - protein, 18 aa, Artificial Sequence
  Description of Artificial Sequence: Synthetic peptide
  N-term H or Acetyl
  MOD_RES (14)..(14): Ser or Phospho-Ser
  MOD_RES (16)..(16): Modified Cys
  See specification as filed for detailed description of substitutions and preferred embodiments
KAKKVKKRPQRATSDCFA

SEQ ID NO: 2618 - protein, 18 aa, Artificial Sequence
  Description of Artificial Sequence: Synthetic peptide
  N-term H or Acetyl
  MOD_RES (14)..(14): Ser or Phospho-Ser
  MOD_RES (16)..(16): Modified Cys
  See specification as filed for detailed description of substitutions and preferred embodiments
KAKKVKKRPQRATSDCFS

SEQ ID NO: 2619 - protein, 18 aa, Artificial Sequence
  Description of Artificial Sequence: Synthetic peptide
  N-term H or Acetyl
  MOD_RES (14)..(14): Ser or Phospho-Ser
  MOD_RES (16)..(16): Modified Cys
  See specification as filed for detailed description of substitutions and preferred embodiments
KAKKVKKRPQRATSNCFA

SEQ ID NO: 2620 - protein, 18 aa, Artificial Sequence
  Description of Artificial Sequence: Synthetic peptide
  N-term H or Acetyl
  MOD_RES (14)..(14): Ser or Phospho-Ser
  MOD_RES (16)..(16): Modified Cys
  See specification as filed for detailed description of substitutions and preferred embodiments
KAKKVKKRPQRATSNCFS

SEQ ID NO: 2621 - protein, 18 aa, Artificial Sequence
  Description of Artificial Sequence: Synthetic peptide
  N-term H or Acetyl
  MOD_RES (16)..(16): Modified Cys
  MOD_RES (18)..(18): Ser or Phospho-Ser
  See specification as filed for detailed description of substitutions and preferred embodiments
KAKKVKKRPQRATSDCFS

SEQ ID NO: 2622 - protein, 18 aa, Artificial Sequence
  Description of Artificial Sequence: Synthetic peptide
  N-term H or Acetyl
  MOD_RES (16)..(16): Modified Cys
  MOD_RES (18)..(18): Ser or Phospho-Ser
  See specification as filed for detailed description of substitutions and preferred embodiments
KAKKVKKRPQRATSNCFS

SEQ ID NO: 2623 - protein, 18 aa, Artificial Sequence
  Description of Artificial Sequence: Synthetic peptide
  N-term H or Acetyl
  MOD_RES (14)..(14): Ser or Phospho-Ser
  MOD_RES (16)..(16): Modified Cys
  See specification as filed for detailed description of substitutions and preferred embodiments
KAKLTKKRPQRATSNCFS

SEQ ID NO: 2624 - protein, 18 aa, Artificial Sequence
  Description of Artificial Sequence: Synthetic peptide
  N-term H or Acetyl
  MOD_RES (16)..(16): Modified Cys
  MOD_RES (18)..(18): Ser or Phospho-Ser
  See specification as filed for detailed description of substitutions and preferred embodiments
KAKLTKKRPQRATSNCFS

SEQ ID NO: 2625 - protein, 18 aa, Artificial Sequence
  Description of Artificial Sequence: Synthetic peptide
  N-term H or Acetyl
  MOD_RES (14)..(14): Ser or Phospho-Ser
  MOD_RES (16)..(16): Modified Cys
  See specification as filed for detailed description of substitutions and preferred embodiments
KAKNTKKRPQRATSNCFS

SEQ ID NO: 2626 - protein, 18 aa, Artificial Sequence
  Description of Artificial Sequence: Synthetic peptide
  N-term H or Acetyl
  MOD_RES (16)..(16): Modified Cys
  MOD_RES (18)..(18): Ser or Phospho-Ser
  See specification as filed for detailed description of substitutions and preferred embodiments
KAKNTKKRPQRATSNCFS

SEQ ID NO: 2627 - protein, 18 aa, Artificial Sequence
  Description of Artificial Sequence: Synthetic peptide
  N-term H or Acetyl
  MOD_RES (14)..(14): Ser or Phospho-Ser
  MOD_RES (16)..(16): Modified Cys
  See specification as filed for detailed description of substitutions and preferred embodiments
KAKPTKKRPQRATSNCFS

SEQ ID NO: 2628 - protein, 18 aa, Artificial Sequence
  Description of Artificial Sequence: Synthetic peptide
  N-term H or Acetyl
  MOD_RES (16)..(16): Modified Cys
  MOD_RES (18)..(18): Ser or Phospho-Ser
  See specification as filed for detailed description of substitutions and preferred embodiments
KAKPTKKRPQRATSNCFS

SEQ ID NO: 2629 - protein, 18 aa, Artificial Sequence
  Description of Artificial Sequence: Synthetic peptide
  N-term H or Acetyl
  MOD_RES (14)..(14): Ser or Phospho-Ser
  MOD_RES (16)..(16): Modified Cys
  See specification as filed for detailed description of substitutions and preferred embodiments
KAKRTKKRPQRATSNCFS

SEQ ID NO: 2630 - protein, 18 aa, Artificial Sequence
  Description of Artificial Sequence: Synthetic peptide
  N-term H or Acetyl
  MOD_RES (16)..(16): Modified Cys
  MOD_RES (18)..(18): Ser or Phospho-Ser
  See specification as filed for detailed description of substitutions and preferred embodiments
KAKRTKKRPQRATSNCFS

SEQ ID NO: 2631 - protein, 18 aa, Artificial Sequence
  Description of Artificial Sequence: Synthetic peptide
  N-term H or Acetyl
  MOD_RES (5)..(5): Leu or Nle (i.e. isomer of Leucine)
  MOD_RES (14)..(14): Ser or Phospho-Ser
  MOD_RES (16)..(16): Modified Cys
  See specification as filed for detailed description of substitutions and preferred embodiments
KAKTLKKRPQRATSNCFS

SEQ ID NO: 2632 - protein, 18 aa, Artificial Sequence
  Description of Artificial Sequence: Synthetic peptide
  N-term H or Acetyl
  MOD_RES (5)..(5): Leu or Nle (i.e. isomer of Leucine)
  MOD_RES (16)..(16): Modified Cys
  MOD_RES (18)..(18): Ser or Phospho-Ser
  See specification as filed for detailed description of substitutions and preferred embodiments
KAKTLKKRPQRATSNCFS

SEQ ID NO: 2633 - protein, 18 aa, Artificial Sequence
  Description of Artificial Sequence: Synthetic peptide
  N-term H or Acetyl
  MOD_RES (14)..(14): Ser or Phospho-Ser
  MOD_RES (16)..(16): Modified Cys
  See specification as filed for detailed description of substitutions and preferred embodiments
KAKTDKKRPQRATSNCFS

SEQ ID NO: 2634 - protein, 18 aa, Artificial Sequence
  Description of Artificial Sequence: Synthetic peptide
  N-term H or Acetyl
  MOD_RES (16)..(16): Modified Cys
  MOD_RES (18)..(18): Ser or Phospho-Ser
  See specification as filed for detailed description of substitutions and preferred embodiments
KAKTDKKRPQRATSNCFS

SEQ ID NO: 2635 - protein, 18 aa, Artificial Sequence
  Description of Artificial Sequence: Synthetic peptide
  N-term H or Acetyl
  MOD_RES (14)..(14): Ser or Phospho-Ser
  MOD_RES (16)..(16): Modified Cys
  See specification as filed for detailed description of substitutions and preferred embodiments
KAKTEKKRPQRATSNCFS

SEQ ID NO: 2636 - protein, 18 aa, Artificial Sequence
  Description of Artificial Sequence: Synthetic peptide
  N-term H or Acetyl
  MOD_RES (16)..(16): Modified Cys
  MOD_RES (18)..(18): Ser or Phospho-Ser
  See specification as filed for detailed description of substitutions and preferred embodiments
KAKTEKKRPQRATSNCFS

SEQ ID NO: 2637 - protein, 18 aa, Artificial Sequence
  Description of Artificial Sequence: Synthetic peptide
  N-term H or Acetyl
  MOD_RES (14)..(14): Ser or Phospho-Ser
  MOD_RES (16)..(16): Modified Cys
  See specification as filed for detailed description of substitutions and preferred embodiments
KAKTFKKRPQRATSNCFS

SEQ ID NO: 2638 - protein, 18 aa, Artificial Sequence
  Description of Artificial Sequence: Synthetic peptide
  N-term H or Acetyl
  MOD_RES (16)..(16): Modified Cys
  MOD_RES (18)..(18): Ser or Phospho-Ser
  See specification as filed for detailed description of substitutions and preferred embodiments
KAKTFKKRPQRATSNCFS

SEQ ID NO: 2639 - protein, 18 aa, Artificial Sequence
  Description of Artificial Sequence: Synthetic peptide
  N-term H or Acetyl
  MOD_RES (14)..(14): Ser or Phospho-Ser
  MOD_RES (16)..(16): Modified Cys
  See specification as filed for detailed description of substitutions and preferred embodiments
KAKTGKKRPQRATSNCFS

SEQ ID NO: 2640 - protein, 18 aa, Artificial Sequence
  Description of Artificial Sequence: Synthetic peptide
  N-term H or Acetyl
  MOD_RES (16)..(16): Modified Cys
  MOD_RES (18)..(18): Ser or Phospho-Ser
  See specification as filed for detailed description of substitutions and preferred embodiments
KAKTGKKRPQRATSNCFS

SEQ ID NO: 2641 - protein, 18 aa, Artificial Sequence
  Description of Artificial Sequence: Synthetic peptide
  N-term H or Acetyl
  MOD_RES (14)..(14): Ser or Phospho-Ser
  MOD_RES (16)..(16): Modified Cys
  See specification as filed for detailed description of substitutions and preferred embodiments
KAKTHKKRPQRATSNCFS

SEQ ID NO: 2642 - protein, 18 aa, Artificial Sequence
  Description of Artificial Sequence: Synthetic peptide
  N-term H or Acetyl
  MOD_RES (16)..(16): Modified Cys
  MOD_RES (18)..(18): Ser or Phospho-Ser
  See specification as filed for detailed description of substitutions and preferred embodiments
KAKTHKKRPQRATSNCFS

SEQ ID NO: 2643 - protein, 18 aa, Artificial Sequence
  Description of Artificial Sequence: Synthetic peptide
  N-term H or Acetyl
  MOD_RES (14)..(14): Ser or Phospho-Ser
  MOD_RES (16)..(16): Modified Cys
  See specification as filed for detailed description of substitutions and preferred embodiments
KAKTIKKRPQRATSNCFS

SEQ ID NO: 2644 - protein, 18 aa, Artificial Sequence
  Description of Artificial Sequence: Synthetic peptide
  N-term H or Acetyl
  MOD_RES (16)..(16): Modified Cys
  MOD_RES (18)..(18): Ser or Phospho-Ser
  See specification as filed for detailed description of substitutions and preferred embodiments
KAKTIKKRPQRATSNCFS

SEQ ID NO: 2645 - protein, 18 aa, Artificial Sequence
  Description of Artificial Sequence: Synthetic peptide
  N-term H or Acetyl
  MOD_RES (14)..(14): Ser or Phospho-Ser
  MOD_RES (16)..(16): Modified Cys
  See specification as filed for detailed description of substitutions and preferred embodiments
KAKTKKKRPQRADSDCFA

SEQ ID NO: 2646 - protein, 18 aa, Artificial Sequence
  Description of Artificial Sequence: Synthetic peptide
  N-term H or Acetyl
  MOD_RES (14)..(14): Ser or Phospho-Ser
  MOD_RES (16)..(16): Modified Cys
  See specification as filed for detailed description of substitutions and preferred embodiments
KAKTKKKRPQRADSDCFS

SEQ ID NO: 2647 - protein, 18 aa, Artificial Sequence
  Description of Artificial Sequence: Synthetic peptide
  N-term H or Acetyl
  MOD_RES (14)..(14): Ser or Phospho-Ser
  MOD_RES (16)..(16): Modified Cys
  See specification as filed for detailed description of substitutions and preferred embodiments
KAKTKKKRPQRADSNCFA

SEQ ID NO: 2648 - protein, 18 aa, Artificial Sequence
  Description of Artificial Sequence: Synthetic peptide
  N-term H or Acetyl
  MOD_RES (14)..(14): Ser or Phospho-Ser
  MOD_RES (16)..(16): Modified Cys
  See specification as filed for detailed description of substitutions and preferred embodiments
KAKTKKKRPQRADSNCFS

SEQ ID NO: 2649 - protein, 18 aa, Artificial Sequence
  Description of Artificial Sequence: Synthetic peptide
  N-term H or Acetyl
  MOD_RES (16)..(16): Modified Cys
  MOD_RES (18)..(18): Ser or Phospho-Ser
  See specification as filed for detailed description of substitutions and preferred embodiments
KAKTKKKRPQRADSDCFS

SEQ ID NO: 2650 - protein, 18 aa, Artificial Sequence
  Description of Artificial Sequence: Synthetic peptide
  N-term H or Acetyl
  MOD_RES (16)..(16): Modified Cys
  MOD_RES (18)..(18): Ser or Phospho-Ser
  See specification as filed for detailed description of substitutions and preferred embodiments
KAKTKKKRPQRADSNCFS

SEQ ID NO: 2651 - protein, 18 aa, Artificial Sequence
  Description of Artificial Sequence: Synthetic peptide
  N-term H or Acetyl
  MOD_RES (14)..(14): Ser or Phospho-Ser
  MOD_RES (16)..(16): Modified Cys
  See specification as filed for detailed description of substitutions and preferred embodiments
KAKTKKKRPQRAESDCFA

SEQ ID NO: 2652 - protein, 18 aa, Artificial Sequence
  Description of Artificial Sequence: Synthetic peptide
  N-term H or Acetyl
  MOD_RES (14)..(14): Ser or Phospho-Ser
  MOD_RES (16)..(16): Modified Cys
  See specification as filed for detailed description of substitutions and preferred embodiments
KAKTKKKRPQRAESDCFS

SEQ ID NO: 2653 - protein, 18 aa, Artificial Sequence
  Description of Artificial Sequence: Synthetic peptide
  N-term H or Acetyl
  MOD_RES (14)..(14): Ser or Phospho-Ser
  MOD_RES (16)..(16): Modified Cys
  See specification as filed for detailed description of substitutions and preferred embodiments
KAKTKKKRPQRAESNCFA

SEQ ID NO: 2654 - protein, 18 aa, Artificial Sequence
  Description of Artificial Sequence: Synthetic peptide
  N-term H or Acetyl
  MOD_RES (14)..(14): Ser or Phospho-Ser
  MOD_RES (16)..(16): Modified Cys
  See specification as filed for detailed description of substitutions and preferred embodiments
KAKTKKKRPQRAESNCFS

SEQ ID NO: 2655 - protein, 18 aa, Artificial Sequence
  Description of Artificial Sequence: Synthetic peptide
  N-term H or Acetyl
  MOD_RES (16)..(16): Modified Cys
  MOD_RES (18)..(18): Ser or Phospho-Ser
  See specification as filed for detailed description of substitutions and preferred embodiments
KAKTKKKRPQRAESDCFS

SEQ ID NO: 2656 - protein, 18 aa, Artificial Sequence
  Description of Artificial Sequence: Synthetic peptide
  N-term H or Acetyl
  MOD_RES (16)..(16): Modified Cys
  MOD_RES (18)..(18): Ser or Phospho-Ser
  See specification as filed for detailed description of substitutions and preferred embodiments
KAKTKKKRPQRAESNCFS

SEQ ID NO: 2657 - protein, 18 aa, Artificial Sequence
  Description of Artificial Sequence: Synthetic peptide
  N-term H or Acetyl
  MOD_RES (14)..(14): Ser or Phospho-Ser
  MOD_RES (16)..(16): Modified Cys
  See specification as filed for detailed description of substitutions and preferred embodiments
KAKTKKKRPQRAHSDCFA

SEQ ID NO: 2658 - protein, 18 aa, Artificial Sequence
  Description of Artificial Sequence: Synthetic peptide
  N-term H or Acetyl
  MOD_RES (14)..(14): Ser or Phospho-Ser
  MOD_RES (16)..(16): Modified Cys
  See specification as filed for detailed description of substitutions and preferred embodiments
KAKTKKKRPQRAHSDCFS

SEQ ID NO: 2659 - protein, 18 aa, Artificial Sequence
  Description of Artificial Sequence: Synthetic peptide
  N-term H or Acetyl
  MOD_RES (14)..(14): Ser or Phospho-Ser
  MOD_RES (16)..(16): Modified Cys
  See specification as filed for detailed description of substitutions and preferred embodiments
KAKTKKKRPQRAHSNCFA

SEQ ID NO: 2660 - protein, 18 aa, Artificial Sequence
  Description of Artificial Sequence: Synthetic peptide
  N-term H or Acetyl
  MOD_RES (14)..(14): Ser or Phospho-Ser
  MOD_RES (16)..(16): Modified Cys
  See specification as filed for detailed description of substitutions and preferred embodiments
KAKTKKKRPQRAHSNCFS

SEQ ID NO: 2661 - protein, 18 aa, Artificial Sequence
  Description of Artificial Sequence: Synthetic peptide
  N-term H or Acetyl
  MOD_RES (16)..(16): Modified Cys
  MOD_RES (18)..(18): Ser or Phospho-Ser
  See specification as filed for detailed description of substitutions and preferred embodiments
KAKTKKKRPQRAHSDCFS

SEQ ID NO: 2662 - protein, 18 aa, Artificial Sequence
  Description of Artificial Sequence: Synthetic peptide
  N-term H or Acetyl
  MOD_RES (16)..(16): Modified Cys
  MOD_RES (18)..(18): Ser or Phospho-Ser
  See specification as filed for detailed description of substitutions and preferred embodiments
KAKTKKKRPQRAHSNCFS

SEQ ID NO: 2663 - protein, 18 aa, Artificial Sequence
  Description of Artificial Sequence: Synthetic peptide
  N-term H or Acetyl
  MOD_RES (14)..(14): Ser or Phospho-Ser
  MOD_RES (16)..(16): Modified Cys
  See specification as filed for detailed description of substitutions and preferred embodiments
KAKTKKKRPQRATSDCFA

SEQ ID NO: 2664 - protein, 18 aa, Artificial Sequence
  Description of Artificial Sequence: Synthetic peptide
  N-term H or Acetyl
  MOD_RES (14)..(14): Ser or Phospho-Ser
  MOD_RES (16)..(16): Modified Cys
  See specification as filed for detailed description of substitutions and preferred embodiments
KAKTKKKRPQRATSDCFS

SEQ ID NO: 2665 - protein, 18 aa, Artificial Sequence
  Description of Artificial Sequence: Synthetic peptide
  N-term H or Acetyl
  MOD_RES (14)..(14): Ser or Phospho-Ser
  MOD_RES (16)..(16): Modified Cys
  See specification as filed for detailed description of substitutions and preferred embodiments
KAKTKKKRPQRATSNCFA

SEQ ID NO: 2666 - protein, 18 aa, Artificial Sequence
  Description of Artificial Sequence: Synthetic peptide
  N-term H or Acetyl
  MOD_RES (14)..(14): Ser or Phospho-Ser
  MOD_RES (16)..(16): Modified Cys
  See specification as filed for detailed description of substitutions and preferred embodiments
KAKTKKKRPQRATSNCFS

SEQ ID NO: 2667 - protein, 18 aa, Artificial Sequence
  Description of Artificial Sequence: Synthetic peptide
  N-term H or Acetyl
  MOD_RES (16)..(16): Modified Cys
  MOD_RES (18)..(18): Ser or Phospho-Ser
  See specification as filed for detailed description of substitutions and preferred embodiments
KAKTKKKRPQRATSDCFS

SEQ ID NO: 2668 - protein, 18 aa, Artificial Sequence
  Description of Artificial Sequence: Synthetic peptide
  N-term H or Acetyl
  MOD_RES (16)..(16): Modified Cys
  MOD_RES (18)..(18): Ser or Phospho-Ser
  See specification as filed for detailed description of substitutions and preferred embodiments
KAKTKKKRPQRATSNCFS

SEQ ID NO: 2669 - protein, 18 aa, Artificial Sequence
  Description of Artificial Sequence: Synthetic peptide
  N-term H or Acetyl
  MOD_RES (14)..(14): Ser or Phospho-Ser
  MOD_RES (16)..(16): Modified Cys
  See specification as filed for detailed description of substitutions and preferred embodiments
KAKTLKKRPQRATSNCFS

SEQ ID NO: 2670 - protein, 18 aa, Artificial Sequence
  Description of Artificial Sequence: Synthetic peptide
  N-term H or Acetyl
  MOD_RES (16)..(16): Modified Cys
  MOD_RES (18)..(18): Ser or Phospho-Ser
  See specification as filed for detailed description of substitutions and preferred embodiments
KAKTLKKRPQRATSNCFS

SEQ ID NO: 2671 - protein, 18 aa, Artificial Sequence
  Description of Artificial Sequence: Synthetic peptide
  N-term H or Acetyl
  MOD_RES (14)..(14): Ser or Phospho-Ser
  MOD_RES (16)..(16): Modified Cys
  See specification as filed for detailed description of substitutions and preferred embodiments
KAKTNKKRPQRATSNCFS

SEQ ID NO: 2672 - protein, 18 aa, Artificial Sequence
  Description of Artificial Sequence: Synthetic peptide
  N-term H or Acetyl
  MOD_RES (16)..(16): Modified Cys
  MOD_RES (18)..(18): Ser or Phospho-Ser
  See specification as filed for detailed description of substitutions and preferred embodiments
KAKTNKKRPQRATSNCFS

SEQ ID NO: 2673 - protein, 18 aa, Artificial Sequence
  Description of Artificial Sequence: Synthetic peptide
  N-term H or Acetyl
  MOD_RES (14)..(14): Ser or Phospho-Ser
  MOD_RES (16)..(16): Modified Cys
  See specification as filed for detailed description of substitutions and preferred embodiments
KAKTPKKRPQRATSNCFS

SEQ ID NO: 2674 - protein, 18 aa, Artificial Sequence
  Description of Artificial Sequence: Synthetic peptide
  N-term H or Acetyl
  MOD_RES (16)..(16): Modified Cys
  MOD_RES (18)..(18): Ser or Phospho-Ser
  See specification as filed for detailed description of substitutions and preferred embodiments
KAKTPKKRPQRATSNCFS

SEQ ID NO: 2675 - protein, 18 aa, Artificial Sequence
  Description of Artificial Sequence: Synthetic peptide
  N-term H or Acetyl
  MOD_RES (14)..(14): Ser or Phospho-Ser
  MOD_RES (16)..(16): Modified Cys
  See specification as filed for detailed description of substitutions and preferred embodiments
KAKTRKKRPQRADSDCFA

SEQ ID NO: 2676 - protein, 18 aa, Artificial Sequence
  Description of Artificial Sequence: Synthetic peptide
  N-term H or Acetyl
  MOD_RES (14)..(14): Ser or Phospho-Ser
  MOD_RES (16)..(16): Modified Cys
  See specification as filed for detailed description of substitutions and preferred embodiments
KAKTRKKRPQRADSDCFS

SEQ ID NO: 2677 - protein, 18 aa, Artificial Sequence
  Description of Artificial Sequence: Synthetic peptide
  N-term H or Acetyl
  MOD_RES (14)..(14): Ser or Phospho-Ser
  MOD_RES (16)..(16): Modified Cys
  See specification as filed for detailed description of substitutions and preferred embodiments
KAKTRKKRPQRADSNCFA

SEQ ID NO: 2678 - protein, 18 aa, Artificial Sequence
  Description of Artificial Sequence: Synthetic peptide
  N-term H or Acetyl
  MOD_RES (14)..(14): Ser or Phospho-Ser
  MOD_RES (16)..(16): Modified Cys
  See specification as filed for detailed description of substitutions and preferred embodiments
KAKTRKKRPQRADSNCFS

SEQ ID NO: 2679 - protein, 18 aa, Artificial Sequence
  Description of Artificial Sequence: Synthetic peptide
  N-term H or Acetyl
  MOD_RES (16)..(16): Modified Cys
  MOD_RES (18)..(18): Ser or Phospho-Ser
  See specification as filed for detailed description of substitutions and preferred embodiments
KAKTRKKRPQRADSDCFS

SEQ ID NO: 2680 - protein, 18 aa, Artificial Sequence
  Description of Artificial Sequence: Synthetic peptide
  N-term H or Acetyl
  MOD_RES (16)..(16): Modified Cys
  MOD_RES (18)..(18): Ser or Phospho-Ser
  See specification as filed for detailed description of substitutions and preferred embodiments
KAKTRKKRPQRADSNCFS

SEQ ID NO: 2681 - protein, 18 aa, Artificial Sequence
  Description of Artificial Sequence: Synthetic peptide
  N-term H or Acetyl
  MOD_RES (14)..(14): Ser or Phospho-Ser
  MOD_RES (16)..(16): Modified Cys
  See specification as filed for detailed description of substitutions and preferred embodiments
KAKTRKKRPQRAESDCFA

SEQ ID NO: 2682 - protein, 18 aa, Artificial Sequence
  Description of Artificial Sequence: Synthetic peptide
  N-term H or Acetyl
  MOD_RES (14)..(14): Ser or Phospho-Ser
  MOD_RES (16)..(16): Modified Cys
  See specification as filed for detailed description of substitutions and preferred embodiments
KAKTRKKRPQRAESDCFS

SEQ ID NO: 2683 - protein, 18 aa, Artificial Sequence
  Description of Artificial Sequence: Synthetic peptide
  N-term H or Acetyl
  MOD_RES (14)..(14): Ser or Phospho-Ser
  MOD_RES (16)..(16): Modified Cys
  See specification as filed for detailed description of substitutions and preferred embodiments
KAKTRKKRPQRAESNCFA

SEQ ID NO: 2684 - protein, 18 aa, Artificial Sequence
  Description of Artificial Sequence: Synthetic peptide
  N-term H or Acetyl
  MOD_RES (14)..(14): Ser or Phospho-Ser
  MOD_RES (16)..(16): Modified Cys
  See specification as filed for detailed description of substitutions and preferred embodiments
KAKTRKKRPQRAESNCFS

SEQ ID NO: 2685 - protein, 18 aa, Artificial Sequence
  Description of Artificial Sequence: Synthetic peptide
  N-term H or Acetyl
  MOD_RES (16)..(16): Modified Cys
  MOD_RES (18)..(18): Ser or Phospho-Ser
  See specification as filed for detailed description of substitutions and preferred embodiments
KAKTRKKRPQRAESDCFS

SEQ ID NO: 2686 - protein, 18 aa, Artificial Sequence
  Description of Artificial Sequence: Synthetic peptide
  N-term H or Acetyl
  MOD_RES (16)..(16): Modified Cys
  MOD_RES (18)..(18): Ser or Phospho-Ser
  See specification as filed for detailed description of substitutions and preferred embodiments
KAKTRKKRPQRAESNCFS

SEQ ID NO: 2687 - protein, 18 aa, Artificial Sequence
  Description of Artificial Sequence: Synthetic peptide
  N-term H or Acetyl
  MOD_RES (14)..(14): Ser or Phospho-Ser
  MOD_RES (16)..(16): Modified Cys
  See specification as filed for detailed description of substitutions and preferred embodiments
KAKTRKKRPQRAHSDCFA

SEQ ID NO: 2688 - protein, 18 aa, Artificial Sequence
  Description of Artificial Sequence: Synthetic peptide
  N-term H or Acetyl
  MOD_RES (14)..(14): Ser or Phospho-Ser
  MOD_RES (16)..(16): Modified Cys
  See specification as filed for detailed description of substitutions and preferred embodiments
KAKTRKKRPQRAHSDCFS

SEQ ID NO: 2689 - protein, 18 aa, Artificial Sequence
  Description of Artificial Sequence: Synthetic peptide
  N-term H or Acetyl
  MOD_RES (14)..(14): Ser or Phospho-Ser
  MOD_RES (16)..(16): Modified Cys
  See specification as filed for detailed description of substitutions and preferred embodiments
KAKTRKKRPQRAHSNCFA

SEQ ID NO: 2690 - protein, 18 aa, Artificial Sequence
  Description of Artificial Sequence: Synthetic peptide
  N-term H or Acetyl
  MOD_RES (14)..(14): Ser or Phospho-Ser
  MOD_RES (16)..(16): Modified Cys
  See specification as filed for detailed description of substitutions and preferred embodiments
KAKTRKKRPQRAHSNCFS

SEQ ID NO: 2691 - protein, 18 aa, Artificial Sequence
  Description of Artificial Sequence: Synthetic peptide
  N-term H or Acetyl
  MOD_RES (16)..(16): Modified Cys
  MOD_RES (18)..(18): Ser or Phospho-Ser
  See specification as filed for detailed description of substitutions and preferred embodiments
KAKTRKKRPQRAHSDCFS

SEQ ID NO: 2692 - protein, 18 aa, Artificial Sequence
  Description of Artificial Sequence: Synthetic peptide
  N-term H or Acetyl
  MOD_RES (16)..(16): Modified Cys
  MOD_RES (18)..(18): Ser or Phospho-Ser
  See specification as filed for detailed description of substitutions and preferred embodiments
KAKTRKKRPQRAHSNCFS

SEQ ID NO: 2693 - protein, 18 aa, Artificial Sequence
  Description of Artificial Sequence: Synthetic peptide
  N-term H or Acetyl
  MOD_RES (14)..(14): Ser or Phospho-Ser
  MOD_RES (16)..(16): Modified Cys
  See specification as filed for detailed description of substitutions and preferred embodiments
KAKTRKKRPQRATSDCFA

SEQ ID NO: 2694 - protein, 18 aa, Artificial Sequence
  Description of Artificial Sequence: Synthetic peptide
  N-term H or Acetyl
  MOD_RES (14)..(14): Ser or Phospho-Ser
  MOD_RES (16)..(16): Modified Cys
  See specification as filed for detailed description of substitutions and preferred embodiments
KAKTRKKRPQRATSDCFS

SEQ ID NO: 2695 - protein, 18 aa, Artificial Sequence
  Description of Artificial Sequence: Synthetic peptide
  N-term H or Acetyl
  MOD_RES (14)..(14): Ser or Phospho-Ser
  MOD_RES (16)..(16): Modified Cys
  See specification as filed for detailed description of substitutions and preferred embodiments
KAKTRKKRPQRATSNCFA

SEQ ID NO: 2696 - protein, 18 aa, Artificial Sequence
  Description of Artificial Sequence: Synthetic peptide
  N-term H or Acetyl
  MOD_RES (14)..(14): Ser or Phospho-Ser
  MOD_RES (16)..(16): Modified Cys
  See specification as filed for detailed description of substitutions and preferred embodiments
KAKTRKKRPQRATSNCFS

SEQ ID NO: 2697 - protein, 18 aa, Artificial Sequence
  Description of Artificial Sequence: Synthetic peptide
  N-term H or Acetyl
  MOD_RES (16)..(16): Modified Cys
  MOD_RES (18)..(18): Ser or Phospho-Ser
  See specification as filed for detailed description of substitutions and preferred embodiments
KAKTRKKRPQRATSDCFS

SEQ ID NO: 2698 - protein, 18 aa, Artificial Sequence
  Description of Artificial Sequence: Synthetic peptide
  N-term H or Acetyl
  MOD_RES (16)..(16): Modified Cys
  MOD_RES (18)..(18): Ser or Phospho-Ser
  See specification as filed for detailed description of substitutions and preferred embodiments
KAKTRKKRPQRATSNCFS

SEQ ID NO: 2699 - protein, 18 aa, Artificial Sequence
  Description of Artificial Sequence: Synthetic peptide
  N-term H or Acetyl
  MOD_RES (6)..(6): Leu or Nle (i.e. isomer of Leucine)
  MOD_RES (14)..(14): Ser or Phospho-Ser
  MOD_RES (16)..(16): Modified Cys
  See specification as filed for detailed description of substitutions and preferred embodiments
KAKTTLKRPQRATSNCFS

SEQ ID NO: 2700 - protein, 18 aa, Artificial Sequence
  Description of Artificial Sequence: Synthetic peptide
  N-term H or Acetyl
  MOD_RES (6)..(6): Leu or Nle (i.e. isomer of Leucine)
  MOD_RES (16)..(16): Modified Cys
  MOD_RES (18)..(18): Ser or Phospho-Ser
  See specification as filed for detailed description of substitutions and preferred embodiments
KAKTTLKRPQRATSNCFS

SEQ ID NO: 2701 - protein, 18 aa, Artificial Sequence
  Description of Artificial Sequence: Synthetic peptide
  N-term H or Acetyl
  MOD_RES (14)..(14): Ser or Phospho-Ser
  MOD_RES (16)..(16): Modified Cys
  See specification as filed for detailed description of substitutions and preferred embodiments
KAKTTDKRPQRATSNCFS

SEQ ID NO: 2702 - protein, 18 aa, Artificial Sequence
  Description of Artificial Sequence: Synthetic peptide
  N-term H or Acetyl
  MOD_RES (16)..(16): Modified Cys
  MOD_RES (18)..(18): Ser or Phospho-Ser
  See specification as filed for detailed description of substitutions and preferred embodiments
KAKTTDKRPQRATSNCFS

SEQ ID NO: 2703 - protein, 18 aa, Artificial Sequence
  Description of Artificial Sequence: Synthetic peptide
  N-term H or Acetyl
  MOD_RES (14)..(14): Ser or Phospho-Ser
  MOD_RES (16)..(16): Modified Cys
  See specification as filed for detailed description of substitutions and preferred embodiments
KAKTTEKRPQRATSNCFS

SEQ ID NO: 2704 - protein, 18 aa, Artificial Sequence
  Description of Artificial Sequence: Synthetic peptide
  N-term H or Acetyl
  MOD_RES (16)..(16): Modified Cys
  MOD_RES (18)..(18): Ser or Phospho-Ser
  See specification as filed for detailed description of substitutions and preferred embodiments
KAKTTEKRPQRATSNCFS

SEQ ID NO: 2705 - protein, 18 aa, Artificial Sequence
  Description of Artificial Sequence: Synthetic peptide
  N-term H or Acetyl
  MOD_RES (14)..(14): Ser or Phospho-Ser
  MOD_RES (16)..(16): Modified Cys
  See specification as filed for detailed description of substitutions and preferred embodiments
KAKTTFKRPQRATSNCFS

SEQ ID NO: 2706 - protein, 18 aa, Artificial Sequence
  Description of Artificial Sequence: Synthetic peptide
  N-term H or Acetyl
  MOD_RES (16)..(16): Modified Cys
  MOD_RES (18)..(18): Ser or Phospho-Ser
  See specification as filed for detailed description of substitutions and preferred embodiments
KAKTTFKRPQRATSNCFS

SEQ ID NO: 2707 - protein, 18 aa, Artificial Sequence
  Description of Artificial Sequence: Synthetic peptide
  N-term H or Acetyl
  MOD_RES (14)..(14): Ser or Phospho-Ser
  MOD_RES (16)..(16): Modified Cys
  See specification as filed for detailed description of substitutions and preferred embodiments
KAKTTGKRPQRATSNCFS

SEQ ID NO: 2708 - protein, 18 aa, Artificial Sequence
  Description of Artificial Sequence: Synthetic peptide
  N-term H or Acetyl
  MOD_RES (16)..(16): Modified Cys
  MOD_RES (18)..(18): Ser or Phospho-Ser
  See specification as filed for detailed description of substitutions and preferred embodiments
KAKTTGKRPQRATSNCFS

SEQ ID NO: 2709 - protein, 18 aa, Artificial Sequence
  Description of Artificial Sequence: Synthetic peptide
  N-term H or Acetyl
  MOD_RES (14)..(14): Ser or Phospho-Ser
  MOD_RES (16)..(16): Modified Cys
  See specification as filed for detailed description of substitutions and preferred embodiments
KAKTTHKRPQRATSNCFS

SEQ ID NO: 2710 - protein, 18 aa, Artificial Sequence
  Description of Artificial Sequence: Synthetic peptide
  N-term H or Acetyl
  MOD_RES (16)..(16): Modified Cys
  MOD_RES (18)..(18): Ser or Phospho-Ser
  See specification as filed for detailed description of substitutions and preferred embodiments
KAKTTHKRPQRATSNCFS

SEQ ID NO: 2711 - protein, 18 aa, Artificial Sequence
  Description of Artificial Sequence: Synthetic peptide
  N-term H or Acetyl
  MOD_RES (14)..(14): Ser or Phospho-Ser
  MOD_RES (16)..(16): Modified Cys
  See specification as filed for detailed description of substitutions and preferred embodiments
KAKTTIKRPQRATSNCFS

SEQ ID NO: 2712 - protein, 18 aa, Artificial Sequence
  Description of Artificial Sequence: Synthetic peptide
  N-term H or Acetyl
  MOD_RES (16)..(16): Modified Cys
  MOD_RES (18)..(18): Ser or Phospho-Ser
  See specification as filed for detailed description of substitutions and preferred embodiments
KAKTTIKRPQRATSNCFS

SEQ ID NO: 2713 - protein, 18 aa, Artificial Sequence
  Description of Artificial Sequence: Synthetic peptide
  N-term H or Acetyl
  MOD_RES (7)..(7): Leu or Nle (i.e. isomer of Leucine)
  MOD_RES (14)..(14): Ser or Phospho-Ser
  MOD_RES (16)..(16): Modified Cys
  See specification as filed for detailed description of substitutions and preferred embodiments
KAKTTKLRPQRATSNCFS

SEQ ID NO: 2714 - protein, 18 aa, Artificial Sequence
  Description of Artificial Sequence: Synthetic peptide
  N-term H or Acetyl
  MOD_RES (7)..(7): Leu or Nle (i.e. isomer of Leucine)
  MOD_RES (16)..(16): Modified Cys
  MOD_RES (18)..(18): Ser or Phospho-Ser
  See specification as filed for detailed description of substitutions and preferred embodiments
KAKTTKLRPQRATSNCFS

SEQ ID NO: 2715 - protein, 18 aa, Artificial Sequence
  Description of Artificial Sequence: Synthetic peptide
  N-term H or Acetyl
  MOD_RES (14)..(14): Ser or Phospho-Ser
  MOD_RES (16)..(16): Modified Cys
  See specification as filed for detailed description of substitutions and preferred embodiments
KAKTTKDRPQRATSNCFS

SEQ ID NO: 2716 - protein, 18 aa, Artificial Sequence
  Description of Artificial Sequence: Synthetic peptide
  N-term H or Acetyl
  MOD_RES (16)..(16): Modified Cys
  MOD_RES (18)..(18): Ser or Phospho-Ser
  See specification as filed for detailed description of substitutions and preferred embodiments
KAKTTKDRPQRATSNCFS

SEQ ID NO: 2717 - protein, 18 aa, Artificial Sequence
  Description of Artificial Sequence: Synthetic peptide
  N-term H or Acetyl
  MOD_RES (14)..(14): Ser or Phospho-Ser
  MOD_RES (16)..(16): Modified Cys
  See specification as filed for detailed description of substitutions and preferred embodiments
KAKTTKERPQRATSNCFS

SEQ ID NO: 2718 - protein, 18 aa, Artificial Sequence
  Description of Artificial Sequence: Synthetic peptide
  N-term H or Acetyl
  MOD_RES (16)..(16): Modified Cys
  MOD_RES (18)..(18): Ser or Phospho-Ser
  See specification as filed for detailed description of substitutions and preferred embodiments
KAKTTKERPQRATSNCFS

SEQ ID NO: 2719 - protein, 18 aa, Artificial Sequence
  Description of Artificial Sequence: Synthetic peptide
  N-term H or Acetyl
  MOD_RES (14)..(14): Ser or Phospho-Ser
  MOD_RES (16)..(16): Modified Cys
  See specification as filed for detailed description of substitutions and preferred embodiments
KAKTTKFRPQRATSNCFS

SEQ ID NO: 2720 - protein, 18 aa, Artificial Sequence
  Description of Artificial Sequence: Synthetic peptide
  N-term H or Acetyl
  MOD_RES (16)..(16): Modified Cys
  MOD_RES (18)..(18): Ser or Phospho-Ser
  See specification as filed for detailed description of substitutions and preferred embodiments
KAKTTKFRPQRATSNCFS

SEQ ID NO: 2721 - protein, 18 aa, Artificial Sequence
  Description of Artificial Sequence: Synthetic peptide
  N-term H or Acetyl
  MOD_RES (14)..(14): Ser or Phospho-Ser
  MOD_RES (16)..(16): Modified Cys
  See specification as filed for detailed description of substitutions and preferred embodiments
KAKTTKGRPQRATSNCFS

SEQ ID NO: 2722 - protein, 18 aa, Artificial Sequence
  Description of Artificial Sequence: Synthetic peptide
  N-term H or Acetyl
  MOD_RES (16)..(16): Modified Cys
  MOD_RES (18)..(18): Ser or Phospho-Ser
  See specification as filed for detailed description of substitutions and preferred embodiments
KAKTTKGRPQRATSNCFS

SEQ ID NO: 2723 - protein, 18 aa, Artificial Sequence
  Description of Artificial Sequence: Synthetic peptide
  N-term H or Acetyl
  MOD_RES (14)..(14): Ser or Phospho-Ser
  MOD_RES (16)..(16): Modified Cys
  See specification as filed for detailed description of substitutions and preferred embodiments
KAKTTKHRPQRATSNCFS

SEQ ID NO: 2724 - protein, 18 aa, Artificial Sequence
  Description of Artificial Sequence: Synthetic peptide
  N-term H or Acetyl
  MOD_RES (16)..(16): Modified Cys
  MOD_RES (18)..(18): Ser or Phospho-Ser
  See specification as filed for detailed description of substitutions and preferred embodiments
KAKTTKHRPQRATSNCFS

SEQ ID NO: 2725 - protein, 18 aa, Artificial Sequence
  Description of Artificial Sequence: Synthetic peptide
  N-term H or Acetyl
  MOD_RES (14)..(14): Ser or Phospho-Ser
  MOD_RES (16)..(16): Modified Cys
  See specification as filed for detailed description of substitutions and preferred embodiments
KAKTTKIRPQRATSNCFS

SEQ ID NO: 2726 - protein, 18 aa, Artificial Sequence
  Description of Artificial Sequence: Synthetic peptide
  N-term H or Acetyl
  MOD_RES (16)..(16): Modified Cys
  MOD_RES (18)..(18): Ser or Phospho-Ser
  See specification as filed for detailed description of substitutions and preferred embodiments
KAKTTKIRPQRATSNCFS

SEQ ID NO: 2727 - protein, 18 aa, Artificial Sequence
  Description of Artificial Sequence: Synthetic peptide
  N-term H or Acetyl
  MOD_RES (8)..(8): Leu or Nle (i.e. isomer of Leucine)
  MOD_RES (14)..(14): Ser or Phospho-Ser
  MOD_RES (16)..(16): Modified Cys
  See specification as filed for detailed description of substitutions and preferred embodiments
KAKTTKKLPQRATSNCFS

SEQ ID NO: 2728 - protein, 18 aa, Artificial Sequence
  Description of Artificial Sequence: Synthetic peptide
  N-term H or Acetyl
  MOD_RES (8)..(8): Leu or Nle (i.e. isomer of Leucine)
  MOD_RES (16)..(16): Modified Cys
  MOD_RES (18)..(18): Ser or Phospho-Ser
  See specification as filed for detailed description of substitutions and preferred embodiments
KAKTTKKLPQRATSNCFS

SEQ ID NO: 2729 - protein, 18 aa, Artificial Sequence
  Description of Artificial Sequence: Synthetic peptide
  N-term H or Acetyl
  MOD_RES (14)..(14): Ser or Phospho-Ser
  MOD_RES (16)..(16): Modified Cys
  See specification as filed for detailed description of substitutions and preferred embodiments
KAKTTKKDPQRATSNCFS

SEQ ID NO: 2730 - protein, 18 aa, Artificial Sequence
  Description of Artificial Sequence: Synthetic peptide
  N-term H or Acetyl
  MOD_RES (16)..(16): Modified Cys
  MOD_RES (18)..(18): Ser or Phospho-Ser
  See specification as filed for detailed description of substitutions and preferred embodiments
KAKTTKKDPQRATSNCFS

SEQ ID NO: 2731 - protein, 18 aa, Artificial Sequence
  Description of Artificial Sequence: Synthetic peptide
  N-term H or Acetyl
  MOD_RES (14)..(14): Ser or Phospho-Ser
  MOD_RES (16)..(16): Modified Cys
  See specification as filed for detailed description of substitutions and preferred embodiments
KAKTTKKEPQRATSNCFS

SEQ ID NO: 2732 - protein, 18 aa, Artificial Sequence
  Description of Artificial Sequence: Synthetic peptide
  N-term H or Acetyl
  MOD_RES (16)..(16): Modified Cys
  MOD_RES (18)..(18): Ser or Phospho-Ser
  See specification as filed for detailed description of substitutions and preferred embodiments
KAKTTKKEPQRATSNCFS

SEQ ID NO: 2733 - protein, 18 aa, Artificial Sequence
  Description of Artificial Sequence: Synthetic peptide
  N-term H or Acetyl
  MOD_RES (14)..(14): Ser or Phospho-Ser
  MOD_RES (16)..(16): Modified Cys
  See specification as filed for detailed description of substitutions and preferred embodiments
KAKTTKKFPQRATSNCFS

SEQ ID NO: 2734 - protein, 18 aa, Artificial Sequence
  Description of Artificial Sequence: Synthetic peptide
  N-term H or Acetyl
  MOD_RES (16)..(16): Modified Cys
  MOD_RES (18)..(18): Ser or Phospho-Ser
  See specification as filed for detailed description of substitutions and preferred embodiments
KAKTTKKFPQRATSNCFS

SEQ ID NO: 2735 - protein, 18 aa, Artificial Sequence
  Description of Artificial Sequence: Synthetic peptide
  N-term H or Acetyl
  MOD_RES (14)..(14): Ser or Phospho-Ser
  MOD_RES (16)..(16): Modified Cys
  See specification as filed for detailed description of substitutions and preferred embodiments
KAKTTKKGPQRATSNCFS

SEQ ID NO: 2736 - protein, 18 aa, Artificial Sequence
  Description of Artificial Sequence: Synthetic peptide
  N-term H or Acetyl
  MOD_RES (16)..(16): Modified Cys
  MOD_RES (18)..(18): Ser or Phospho-Ser
  See specification as filed for detailed description of substitutions and preferred embodiments
KAKTTKKGPQRATSNCFS

SEQ ID NO: 2737 - protein, 18 aa, Artificial Sequence
  Description of Artificial Sequence: Synthetic peptide
  N-term H or Acetyl
  MOD_RES (14)..(14): Ser or Phospho-Ser
  MOD_RES (16)..(16): Modified Cys
  See specification as filed for detailed description of substitutions and preferred embodiments
KAKTTKKHPQRATSNCFS

SEQ ID NO: 2738 - protein, 18 aa, Artificial Sequence
  Description of Artificial Sequence: Synthetic peptide
  N-term H or Acetyl
  MOD_RES (16)..(16): Modified Cys
  MOD_RES (18)..(18): Ser or Phospho-Ser
  See specification as filed for detailed description of substitutions and preferred embodiments
KAKTTKKHPQRATSNCFS

SEQ ID NO: 2739 - protein, 18 aa, Artificial Sequence
  Description of Artificial Sequence: Synthetic peptide
  N-term H or Acetyl
  MOD_RES (14)..(14): Ser or Phospho-Ser
  MOD_RES (16)..(16): Modified Cys
  See specification as filed for detailed description of substitutions and preferred embodiments
KAKTTKKIPQRATSNCFS

SEQ ID NO: 2740 - protein, 18 aa, Artificial Sequence
  Description of Artificial Sequence: Synthetic peptide
  N-term H or Acetyl
  MOD_RES (16)..(16): Modified Cys
  MOD_RES (18)..(18): Ser or Phospho-Ser
  See specification as filed for detailed description of substitutions and preferred embodiments
KAKTTKKIPQRATSNCFS

SEQ ID NO: 2741 - protein, 18 aa, Artificial Sequence
  Description of Artificial Sequence: Synthetic peptide
  N-term H or Acetyl
  MOD_RES (14)..(14): Ser or Phospho-Ser
  MOD_RES (16)..(16): Modified Cys
  See specification as filed for detailed description of substitutions and preferred embodiments
KAKTTKKKPQRATSNCFS

SEQ ID NO: 2742 - protein, 18 aa, Artificial Sequence
  Description of Artificial Sequence: Synthetic peptide
  N-term H or Acetyl
  MOD_RES (16)..(16): Modified Cys
  MOD_RES (18)..(18): Ser or Phospho-Ser
  See specification as filed for detailed description of substitutions and preferred embodiments
KAKTTKKKPQRATSNCFS

SEQ ID NO: 2743 - protein, 18 aa, Artificial Sequence
  Description of Artificial Sequence: Synthetic peptide
  N-term H or Acetyl
  MOD_RES (14)..(14): Ser or Phospho-Ser
  MOD_RES (16)..(16): Modified Cys
  See specification as filed for detailed description of substitutions and preferred embodiments
KAKTTKKLPQRATSNCFS

SEQ ID NO: 2744 - protein, 18 aa, Artificial Sequence
  Description of Artificial Sequence: Synthetic peptide
  N-term H or Acetyl
  MOD_RES (16)..(16): Modified Cys
  MOD_RES (18)..(18): Ser or Phospho-Ser
  See specification as filed for detailed description of substitutions and preferred embodiments
KAKTTKKLPQRATSNCFS

SEQ ID NO: 2745 - protein, 18 aa, Artificial Sequence
  Description of Artificial Sequence: Synthetic peptide
  N-term H or Acetyl
  MOD_RES (14)..(14): Ser or Phospho-Ser
  MOD_RES (16)..(16): Modified Cys
  See specification as filed for detailed description of substitutions and preferred embodiments
KAKTTKKNPQRATSNCFS

SEQ ID NO: 2746 - protein, 18 aa, Artificial Sequence
  Description of Artificial Sequence: Synthetic peptide
  N-term H or Acetyl
  MOD_RES (16)..(16): Modified Cys
  MOD_RES (18)..(18): Ser or Phospho-Ser
  See specification as filed for detailed description of substitutions and preferred embodiments
KAKTTKKNPQRATSNCFS

SEQ ID NO: 2747 - protein, 18 aa, Artificial Sequence
  Description of Artificial Sequence: Synthetic peptide
  N-term H or Acetyl
  MOD_RES (14)..(14): Ser or Phospho-Ser
  MOD_RES (16)..(16): Modified Cys
  See specification as filed for detailed description of substitutions and preferred embodiments
KAKTTKKPPQRATSNCFS

SEQ ID NO: 2748 - protein, 18 aa, Artificial Sequence
  Description of Artificial Sequence: Synthetic peptide
  N-term H or Acetyl
  MOD_RES (16)..(16): Modified Cys
  MOD_RES (18)..(18): Ser or Phospho-Ser
  See specification as filed for detailed description of substitutions and preferred embodiments
KAKTTKKPPQRATSNCFS

SEQ ID NO: 2749 - protein, 18 aa, Artificial Sequence
  Description of Artificial Sequence: Synthetic peptide
  N-term H or Acetyl
  MOD_RES (9)..(9): Leu or Nle (i.e. isomer of Leucine)
  MOD_RES (14)..(14): Ser or Phospho-Ser
  MOD_RES (16)..(16): Modified Cys
  See specification as filed for detailed description of substitutions and preferred embodiments
KAKTTKKRLQRATSNCFS

SEQ ID NO: 2750 - protein, 18 aa, Artificial Sequence
  Description of Artificial Sequence: Synthetic peptide
  N-term H or Acetyl
  MOD_RES (9)..(9): Leu or Nle (i.e. isomer of Leucine)
  MOD_RES (16)..(16): Modified Cys
  MOD_RES (18)..(18): Ser or Phospho-Ser
  See specification as filed for detailed description of substitutions and preferred embodiments
KAKTTKKRLQRATSNCFS

SEQ ID NO: 2751 - protein, 18 aa, Artificial Sequence
  Description of Artificial Sequence: Synthetic peptide
  N-term H or Acetyl
  MOD_RES (14)..(14): Ser or Phospho-Ser
  MOD_RES (16)..(16): Modified Cys
  See specification as filed for detailed description of substitutions and preferred embodiments
KAKTTKKRDQRATSNCFS

SEQ ID NO: 2752 - protein, 18 aa, Artificial Sequence
  Description of Artificial Sequence: Synthetic peptide
  N-term H or Acetyl
  MOD_RES (16)..(16): Modified Cys
  MOD_RES (18)..(18): Ser or Phospho-Ser
  See specification as filed for detailed description of substitutions and preferred embodiments
KAKTTKKRDQRATSNCFS

SEQ ID NO: 2753 - protein, 18 aa, Artificial Sequence
  Description of Artificial Sequence: Synthetic peptide
  N-term H or Acetyl
  MOD_RES (14)..(14): Ser or Phospho-Ser
  MOD_RES (16)..(16): Modified Cys
  See specification as filed for detailed description of substitutions and preferred embodiments
KAKTTKKREQRATSNCFS

SEQ ID NO: 2754 - protein, 18 aa, Artificial Sequence
  Description of Artificial Sequence: Synthetic peptide
  N-term H or Acetyl
  MOD_RES (16)..(16): Modified Cys
  MOD_RES (18)..(18): Ser or Phospho-Ser
  See specification as filed for detailed description of substitutions and preferred embodiments
KAKTTKKREQRATSNCFS

SEQ ID NO: 2755 - protein, 18 aa, Artificial Sequence
  Description of Artificial Sequence: Synthetic peptide
  N-term H or Acetyl
  MOD_RES (14)..(14): Ser or Phospho-Ser
  MOD_RES (16)..(16): Modified Cys
  See specification as filed for detailed description of substitutions and preferred embodiments
KAKTTKKRFQRATSNCFS

SEQ ID NO: 2756 - protein, 18 aa, Artificial Sequence
  Description of Artificial Sequence: Synthetic peptide
  N-term H or Acetyl
  MOD_RES (16)..(16): Modified Cys
  MOD_RES (18)..(18): Ser or Phospho-Ser
  See specification as filed for detailed description of substitutions and preferred embodiments
KAKTTKKRFQRATSNCFS

SEQ ID NO: 2757 - protein, 18 aa, Artificial Sequence
  Description of Artificial Sequence: Synthetic peptide
  N-term H or Acetyl
  MOD_RES (14)..(14): Ser or Phospho-Ser
  MOD_RES (16)..(16): Modified Cys
  See specification as filed for detailed description of substitutions and preferred embodiments
KAKTTKKRGQRATSNCFS

SEQ ID NO: 2758 - protein, 18 aa, Artificial Sequence
  Description of Artificial Sequence: Synthetic peptide
  N-term H or Acetyl
  MOD_RES (16)..(16): Modified Cys
  MOD_RES (18)..(18): Ser or Phospho-Ser
  See specification as filed for detailed description of substitutions and preferred embodiments
KAKTTKKRGQRATSNCFS

SEQ ID NO: 2759 - protein, 18 aa, Artificial Sequence
  Description of Artificial Sequence: Synthetic peptide
  N-term H or Acetyl
  MOD_RES (14)..(14): Ser or Phospho-Ser
  MOD_RES (16)..(16): Modified Cys
  See specification as filed for detailed description of substitutions and preferred embodiments
KAKTTKKRHQRATSNCFS

SEQ ID NO: 2760 - protein, 18 aa, Artificial Sequence
  Description of Artificial Sequence: Synthetic peptide
  N-term H or Acetyl
  MOD_RES (16)..(16): Modified Cys
  MOD_RES (18)..(18): Ser or Phospho-Ser
  See specification as filed for detailed description of substitutions and preferred embodiments
KAKTTKKRHQRATSNCFS

SEQ ID NO: 2761 - protein, 18 aa, Artificial Sequence
  Description of Artificial Sequence: Synthetic peptide
  N-term H or Acetyl
  MOD_RES (14)..(14): Ser or Phospho-Ser
  MOD_RES (16)..(16): Modified Cys
  See specification as filed for detailed description of substitutions and preferred embodiments
KAKTTKKRIQRATSNCFS

SEQ ID NO: 2762 - protein, 18 aa, Artificial Sequence
  Description of Artificial Sequence: Synthetic peptide
  N-term H or Acetyl
  MOD_RES (16)..(16): Modified Cys
  MOD_RES (18)..(18): Ser or Phospho-Ser
  See specification as filed for detailed description of substitutions and preferred embodiments
KAKTTKKRIQRATSNCFS

SEQ ID NO: 2763 - protein, 18 aa, Artificial Sequence
  Description of Artificial Sequence: Synthetic peptide
  N-term H or Acetyl
  MOD_RES (14)..(14): Ser or Phospho-Ser
  MOD_RES (16)..(16): Modified Cys
  See specification as filed for detailed description of substitutions and preferred embodiments
KAKTTKKRKQRATSNCFS

SEQ ID NO: 2764 - protein, 18 aa, Artificial Sequence
  Description of Artificial Sequence: Synthetic peptide
  N-term H or Acetyl
  MOD_RES (16)..(16): Modified Cys
  MOD_RES (18)..(18): Ser or Phospho-Ser
  See specification as filed for detailed description of substitutions and preferred embodiments
KAKTTKKRKQRATSNCFS

SEQ ID NO: 2765 - protein, 18 aa, Artificial Sequence
  Description of Artificial Sequence: Synthetic peptide
  N-term H or Acetyl
  MOD_RES (14)..(14): Ser or Phospho-Ser
  MOD_RES (16)..(16): Modified Cys
  See specification as filed for detailed description of substitutions and preferred embodiments
KAKTTKKRLQRATSNCFS

SEQ ID NO: 2766 - protein, 18 aa, Artificial Sequence
  Description of Artificial Sequence: Synthetic peptide
  N-term H or Acetyl
  MOD_RES (16)..(16): Modified Cys
  MOD_RES (18)..(18): Ser or Phospho-Ser
  See specification as filed for detailed description of substitutions and preferred embodiments
KAKTTKKRLQRATSNCFS

SEQ ID NO: 2767 - protein, 18 aa, Artificial Sequence
  Description of Artificial Sequence: Synthetic peptide
  N-term H or Acetyl
  MOD_RES (14)..(14): Ser or Phospho-Ser
  MOD_RES (16)..(16): Modified Cys
  See specification as filed for detailed description of substitutions and preferred embodiments
KAKTTKKRNQRATSNCFS

SEQ ID NO: 2768 - protein, 18 aa, Artificial Sequence
  Description of Artificial Sequence: Synthetic peptide
  N-term H or Acetyl
  MOD_RES (16)..(16): Modified Cys
  MOD_RES (18)..(18): Ser or Phospho-Ser
  See specification as filed for detailed description of substitutions and preferred embodiments
KAKTTKKRNQRATSNCFS

SEQ ID NO: 2769 - protein, 18 aa, Artificial Sequence
  Description of Artificial Sequence: Synthetic peptide
  N-term H or Acetyl
  MOD_RES (10)..(10): Leu or Nle (i.e. isomer of Leucine)
  MOD_RES (14)..(14): Ser or Phospho-Ser
  MOD_RES (16)..(16): Modified Cys
  See specification as filed for detailed description of substitutions and preferred embodiments
KAKTTKKRPLRATSNCFS

SEQ ID NO: 2770 - protein, 18 aa, Artificial Sequence
  Description of Artificial Sequence: Synthetic peptide
  N-term H or Acetyl
  MOD_RES (10)..(10): Leu or Nle (i.e. isomer of Leucine)
  MOD_RES (16)..(16): Modified Cys
  MOD_RES (18)..(18): Ser or Phospho-Ser
  See specification as filed for detailed description of substitutions and preferred embodiments
KAKTTKKRPLRATSNCFS

SEQ ID NO: 2771 - protein, 18 aa, Artificial Sequence
  Description of Artificial Sequence: Synthetic peptide
  N-term H or Acetyl
  MOD_RES (14)..(14): Ser or Phospho-Ser
  MOD_RES (16)..(16): Modified Cys
  See specification as filed for detailed description of substitutions and preferred embodiments
KAKTTKKRPDRATSNCFS

SEQ ID NO: 2772 - protein, 18 aa, Artificial Sequence
  Description of Artificial Sequence: Synthetic peptide
  N-term H or Acetyl
  MOD_RES (16)..(16): Modified Cys
  MOD_RES (18)..(18): Ser or Phospho-Ser
  See specification as filed for detailed description of substitutions and preferred embodiments
KAKTTKKRPDRATSNCFS

SEQ ID NO: 2773 - protein, 18 aa, Artificial Sequence
  Description of Artificial Sequence: Synthetic peptide
  N-term H or Acetyl
  MOD_RES (14)..(14): Ser or Phospho-Ser
  MOD_RES (16)..(16): Modified Cys
  See specification as filed for detailed description of substitutions and preferred embodiments
KAKTTKKRPERATSNCFS

SEQ ID NO: 2774 - protein, 18 aa, Artificial Sequence
  Description of Artificial Sequence: Synthetic peptide
  N-term H or Acetyl
  MOD_RES (16)..(16): Modified Cys
  MOD_RES (18)..(18): Ser or Phospho-Ser
  See specification as filed for detailed description of substitutions and preferred embodiments
KAKTTKKRPERATSNCFS

SEQ ID NO: 2775 - protein, 18 aa, Artificial Sequence
  Description of Artificial Sequence: Synthetic peptide
  N-term H or Acetyl
  MOD_RES (14)..(14): Ser or Phospho-Ser
  MOD_RES (16)..(16): Modified Cys
  See specification as filed for detailed description of substitutions and preferred embodiments
KAKTTKKRPFRATSNCFS

SEQ ID NO: 2776 - protein, 18 aa, Artificial Sequence
  Description of Artificial Sequence: Synthetic peptide
  N-term H or Acetyl
  MOD_RES (16)..(16): Modified Cys
  MOD_RES (18)..(18): Ser or Phospho-Ser
  See specification as filed for detailed description of substitutions and preferred embodiments
KAKTTKKRPFRATSNCFS

SEQ ID NO: 2777 - protein, 18 aa, Artificial Sequence
  Description of Artificial Sequence: Synthetic peptide
  N-term H or Acetyl
  MOD_RES (14)..(14): Ser or Phospho-Ser
  MOD_RES (16)..(16): Modified Cys
  See specification as filed for detailed description of substitutions and preferred embodiments
KAKTTKKRPGRATSNCFS

SEQ ID NO: 2778 - protein, 18 aa, Artificial Sequence
  Description of Artificial Sequence: Synthetic peptide
  N-term H or Acetyl
  MOD_RES (16)..(16): Modified Cys
  MOD_RES (18)..(18): Ser or Phospho-Ser
  See specification as filed for detailed description of substitutions and preferred embodiments
KAKTTKKRPGRATSNCFS

SEQ ID NO: 2779 - protein, 18 aa, Artificial Sequence
  Description of Artificial Sequence: Synthetic peptide
  N-term H or Acetyl
  MOD_RES (14)..(14): Ser or Phospho-Ser
  MOD_RES (16)..(16): Modified Cys
  See specification as filed for detailed description of substitutions and preferred embodiments
KAKTTKKRPHRATSNCFS

SEQ ID NO: 2780 - protein, 18 aa, Artificial Sequence
  Description of Artificial Sequence: Synthetic peptide
  N-term H or Acetyl
  MOD_RES (16)..(16): Modified Cys
  MOD_RES (18)..(18): Ser or Phospho-Ser
  See specification as filed for detailed description of substitutions and preferred embodiments
KAKTTKKRPHRATSNCFS

SEQ ID NO: 2781 - protein, 18 aa, Artificial Sequence
  Description of Artificial Sequence: Synthetic peptide
  N-term H or Acetyl
  MOD_RES (14)..(14): Ser or Phospho-Ser
  MOD_RES (16)..(16): Modified Cys
  See specification as filed for detailed description of substitutions and preferred embodiments
KAKTTKKRPIRATSNCFS

SEQ ID NO: 2782 - protein, 18 aa, Artificial Sequence
  Description of Artificial Sequence: Synthetic peptide
  N-term H or Acetyl
  MOD_RES (16)..(16): Modified Cys
  MOD_RES (18)..(18): Ser or Phospho-Ser
  See specification as filed for detailed description of substitutions and preferred embodiments
KAKTTKKRPIRATSNCFS

SEQ ID NO: 2783 - protein, 18 aa, Artificial Sequence
  Description of Artificial Sequence: Synthetic peptide
  N-term H or Acetyl
  MOD_RES (14)..(14): Ser or Phospho-Ser
  MOD_RES (16)..(16): Modified Cys
  See specification as filed for detailed description of substitutions and preferred embodiments
KAKTTKKRPKRATSNCFS

SEQ ID NO: 2784 - protein, 18 aa, Artificial Sequence
  Description of Artificial Sequence: Synthetic peptide
  N-term H or Acetyl
  MOD_RES (16)..(16): Modified Cys
  MOD_RES (18)..(18): Ser or Phospho-Ser
  See specification as filed for detailed description of substitutions and preferred embodiments
KAKTTKKRPKRATSNCFS

SEQ ID NO: 2785 - protein, 18 aa, Artificial Sequence
  Description of Artificial Sequence: Synthetic peptide
  N-term H or Acetyl
  MOD_RES (14)..(14): Ser or Phospho-Ser
  MOD_RES (16)..(16): Modified Cys
  See specification as filed for detailed description of substitutions and preferred embodiments
KAKTTKKRPLRATSNCFS

SEQ ID NO: 2786 - protein, 18 aa, Artificial Sequence
  Description of Artificial Sequence: Synthetic peptide
  N-term H or Acetyl
  MOD_RES (16)..(16): Modified Cys
  MOD_RES (18)..(18): Ser or Phospho-Ser
  See specification as filed for detailed description of substitutions and preferred embodiments
KAKTTKKRPLRATSNCFS

SEQ ID NO: 2787 - protein, 18 aa, Artificial Sequence
  Description of Artificial Sequence: Synthetic peptide
  N-term H or Acetyl
  MOD_RES (14)..(14): Ser or Phospho-Ser
  MOD_RES (16)..(16): Modified Cys
  See specification as filed for detailed description of substitutions and preferred embodiments
KAKTTKKRPNRATSNCFS

SEQ ID NO: 2788 - protein, 18 aa, Artificial Sequence
  Description of Artificial Sequence: Synthetic peptide
  N-term H or Acetyl
  MOD_RES (16)..(16): Modified Cys
  MOD_RES (18)..(18): Ser or Phospho-Ser
  See specification as filed for detailed description of substitutions and preferred embodiments
KAKTTKKRPNRATSNCFS

SEQ ID NO: 2789 - protein, 18 aa, Artificial Sequence
  Description of Artificial Sequence: Synthetic peptide
  N-term H or Acetyl
  MOD_RES (14)..(14): Ser or Phospho-Ser
  MOD_RES (16)..(16): Modified Cys
  See specification as filed for detailed description of substitutions and preferred embodiments
KAKTTKKRPPRATSNCFS

SEQ ID NO: 2790 - protein, 18 aa, Artificial Sequence
  Description of Artificial Sequence: Synthetic peptide
  N-term H or Acetyl
  MOD_RES (16)..(16): Modified Cys
  MOD_RES (18)..(18): Ser or Phospho-Ser
  See specification as filed for detailed description of substitutions and preferred embodiments
KAKTTKKRPPRATSNCFS

SEQ ID NO: 2791 - protein, 18 aa, Artificial Sequence
  Description of Artificial Sequence: Synthetic peptide
  N-term H or Acetyl
  MOD_RES (11)..(11): Leu or Nle (i.e. isomer of Leucine)
  MOD_RES (14)..(14): Ser or Phospho-Ser
  MOD_RES (16)..(16): Modified Cys
  See specification as filed for detailed description of substitutions and preferred embodiments
KAKTTKKRPQLATSNCFS

SEQ ID NO: 2792 - protein, 18 aa, Artificial Sequence
  Description of Artificial Sequence: Synthetic peptide
  N-term H or Acetyl
  MOD_RES (11)..(11): Leu or Nle (i.e. isomer of Leucine)
  MOD_RES (16)..(16): Modified Cys
  MOD_RES (18)..(18): Ser or Phospho-Ser
  See specification as filed for detailed description of substitutions and preferred embodiments
KAKTTKKRPQLATSNCFS

SEQ ID NO: 2793 - protein, 18 aa, Artificial Sequence
  Description of Artificial Sequence: Synthetic peptide
  N-term H or Acetyl
  MOD_RES (14)..(14): Ser or Phospho-Ser
  MOD_RES (16)..(16): Modified Cys
  See specification as filed for detailed description of substitutions and preferred embodiments
KAKTTKKRPQDATSNCFS

SEQ ID NO: 2794 - protein, 18 aa, Artificial Sequence
  Description of Artificial Sequence: Synthetic peptide
  N-term H or Acetyl
  MOD_RES (16)..(16): Modified Cys
  MOD_RES (18)..(18): Ser or Phospho-Ser
  See specification as filed for detailed description of substitutions and preferred embodiments
KAKTTKKRPQDATSNCFS

SEQ ID NO: 2795 - protein, 18 aa, Artificial Sequence
  Description of Artificial Sequence: Synthetic peptide
  N-term H or Acetyl
  MOD_RES (14)..(14): Ser or Phospho-Ser
  MOD_RES (16)..(16): Modified Cys
  See specification as filed for detailed description of substitutions and preferred embodiments
KAKTTKKRPQEATSNCFS

SEQ ID NO: 2796 - protein, 18 aa, Artificial Sequence
  Description of Artificial Sequence: Synthetic peptide
  N-term H or Acetyl
  MOD_RES (16)..(16): Modified Cys
  MOD_RES (18)..(18): Ser or Phospho-Ser
  See specification as filed for detailed description of substitutions and preferred embodiments
KAKTTKKRPQEATSNCFS

SEQ ID NO: 2797 - protein, 18 aa, Artificial Sequence
  Description of Artificial Sequence: Synthetic peptide
  N-term H or Acetyl
  MOD_RES (14)..(14): Ser or Phospho-Ser
  MOD_RES (16)..(16): Modified Cys
  See specification as filed for detailed description of substitutions and preferred embodiments
KAKTTKKRPQFATSNCFS

SEQ ID NO: 2798 - protein, 18 aa, Artificial Sequence
  Description of Artificial Sequence: Synthetic peptide
  N-term H or Acetyl
  MOD_RES (16)..(16): Modified Cys
  MOD_RES (18)..(18): Ser or Phospho-Ser
  See specification as filed for detailed description of substitutions and preferred embodiments
KAKTTKKRPQFATSNCFS

SEQ ID NO: 2799 - protein, 18 aa, Artificial Sequence
  Description of Artificial Sequence: Synthetic peptide
  N-term H or Acetyl
  MOD_RES (14)..(14): Ser or Phospho-Ser
  MOD_RES (16)..(16): Modified Cys
  See specification as filed for detailed description of substitutions and preferred embodiments
KAKTTKKRPQGATSNCFS

SEQ ID NO: 2800 - protein, 18 aa, Artificial Sequence
  Description of Artificial Sequence: Synthetic peptide
  N-term H or Acetyl
  MOD_RES (16)..(16): Modified Cys
  MOD_RES (18)..(18): Ser or Phospho-Ser
  See specification as filed for detailed description of substitutions and preferred embodiments
KAKTTKKRPQGATSNCFS

SEQ ID NO: 2801 - protein, 18 aa, Artificial Sequence
  Description of Artificial Sequence: Synthetic peptide
  N-term H or Acetyl
  MOD_RES (14)..(14): Ser or Phospho-Ser
  MOD_RES (16)..(16): Modified Cys
  See specification as filed for detailed description of substitutions and preferred embodiments
KAKTTKKRPQHATSNCFS

SEQ ID NO: 2802 - protein, 18 aa, Artificial Sequence
  Description of Artificial Sequence: Synthetic peptide
  N-term H or Acetyl
  MOD_RES (16)..(16): Modified Cys
  MOD_RES (18)..(18): Ser or Phospho-Ser
  See specification as filed for detailed description of substitutions and preferred embodiments
KAKTTKKRPQHATSNCFS

SEQ ID NO: 2803 - protein, 18 aa, Artificial Sequence
  Description of Artificial Sequence: Synthetic peptide
  N-term H or Acetyl
  MOD_RES (14)..(14): Ser or Phospho-Ser
  MOD_RES (16)..(16): Modified Cys
  See specification as filed for detailed description of substitutions and preferred embodiments
KAKTTKKRPQIATSNCFS

SEQ ID NO: 2804 - protein, 18 aa, Artificial Sequence
  Description of Artificial Sequence: Synthetic peptide
  N-term H or Acetyl
  MOD_RES (16)..(16): Modified Cys
  MOD_RES (18)..(18): Ser or Phospho-Ser
  See specification as filed for detailed description of substitutions and preferred embodiments
KAKTTKKRPQIATSNCFS

SEQ ID NO: 2805 - protein, 18 aa, Artificial Sequence
  Description of Artificial Sequence: Synthetic peptide
  N-term H or Acetyl
  MOD_RES (14)..(14): Ser or Phospho-Ser
  MOD_RES (16)..(16): Modified Cys
  See specification as filed for detailed description of substitutions and preferred embodiments
KAKTTKKRPQKATSNCFS

SEQ ID NO: 2806 - protein, 18 aa, Artificial Sequence
  Description of Artificial Sequence: Synthetic peptide
  N-term H or Acetyl
  MOD_RES (16)..(16): Modified Cys
  MOD_RES (18)..(18): Ser or Phospho-Ser
  See specification as filed for detailed description of substitutions and preferred embodiments
KAKTTKKRPQKATSNCFS

SEQ ID NO: 2807 - protein, 18 aa, Artificial Sequence
  Description of Artificial Sequence: Synthetic peptide
  N-term H or Acetyl
  MOD_RES (14)..(14): Ser or Phospho-Ser
  MOD_RES (16)..(16): Modified Cys
  See specification as filed for detailed description of substitutions and preferred embodiments
KAKTTKKRPQLATSNCFS

SEQ ID NO: 2808 - protein, 18 aa, Artificial Sequence
  Description of Artificial Sequence: Synthetic peptide
  N-term H or Acetyl
  MOD_RES (16)..(16): Modified Cys
  MOD_RES (18)..(18): Ser or Phospho-Ser
  See specification as filed for detailed description of substitutions and preferred embodiments
KAKTTKKRPQLATSNCFS

SEQ ID NO: 2809 - protein, 18 aa, Artificial Sequence
  Description of Artificial Sequence: Synthetic peptide
  N-term H or Acetyl
  MOD_RES (14)..(14): Ser or Phospho-Ser
  MOD_RES (16)..(16): Modified Cys
  See specification as filed for detailed description of substitutions and preferred embodiments
KAKTTKKRPQNATSNCFS

SEQ ID NO: 2810 - protein, 18 aa, Artificial Sequence
  Description of Artificial Sequence: Synthetic peptide
  N-term H or Acetyl
  MOD_RES (16)..(16): Modified Cys
  MOD_RES (18)..(18): Ser or Phospho-Ser
  See specification as filed for detailed description of substitutions and preferred embodiments
KAKTTKKRPQNATSNCFS

SEQ ID NO: 2811 - protein, 18 aa, Artificial Sequence
  Description of Artificial Sequence: Synthetic peptide
  N-term H or Acetyl
  MOD_RES (14)..(14): Ser or Phospho-Ser
  MOD_RES (16)..(16): Modified Cys
  See specification as filed for detailed description of substitutions and preferred embodiments
KAKTTKKRPQPATSNCFS

SEQ ID NO: 2812 - protein, 18 aa, Artificial Sequence
  Description of Artificial Sequence: Synthetic peptide
  N-term H or Acetyl
  MOD_RES (16)..(16): Modified Cys
  MOD_RES (18)..(18): Ser or Phospho-Ser
  See specification as filed for detailed description of substitutions and preferred embodiments
KAKTTKKRPQPATSNCFS

SEQ ID NO: 2813 - protein, 18 aa, Artificial Sequence
  Description of Artificial Sequence: Synthetic peptide
  N-term H or Acetyl
  MOD_RES (12)..(12): Leu or Nle (i.e. isomer of Leucine)
  MOD_RES (14)..(14): Ser or Phospho-Ser
  MOD_RES (16)..(16): Modified Cys
  See specification as filed for detailed description of substitutions and preferred embodiments
KAKTTKKRPQRLTSNCFS

SEQ ID NO: 2814 - protein, 18 aa, Artificial Sequence
  Description of Artificial Sequence: Synthetic peptide
  N-term H or Acetyl
  MOD_RES (12)..(12): Leu or Nle (i.e. isomer of Leucine)
  MOD_RES (16)..(16): Modified Cys
  MOD_RES (18)..(18): Ser or Phospho-Ser
  See specification as filed for detailed description of substitutions and preferred embodiments
KAKTTKKRPQRLTSNCFS

SEQ ID NO: 2815 - protein, 18 aa, Artificial Sequence
  Description of Artificial Sequence: Synthetic peptide
  N-term H or Acetyl
  MOD_RES (13)..(13): Leu or Nle (i.e. isomer of Leucine)
  MOD_RES (14)..(14): Ser or Phospho-Ser
  MOD_RES (16)..(16): Modified Cys
  See specification as filed for detailed description of substitutions and preferred embodiments
KAKTTKKRPQRALSNCFS

SEQ ID NO: 2816 - protein, 18 aa, Artificial Sequence
  Description of Artificial Sequence: Synthetic peptide
  N-term H or Acetyl
  MOD_RES (13)..(13): Leu or Nle (i.e. isomer of Leucine)
  MOD_RES (16)..(16): Modified Cys
  MOD_RES (18)..(18): Ser or Phospho-Ser
  See specification as filed for detailed description of substitutions and preferred embodiments
KAKTTKKRPQRALSNCFS

SEQ ID NO: 2817 - protein, 18 aa, Artificial Sequence
  Description of Artificial Sequence: Synthetic peptide
  N-term H or Acetyl
  MOD_RES (14)..(14): Ser or Phospho-Ser
  MOD_RES (16)..(16): Modified Cys
  See specification as filed for detailed description of substitutions and preferred embodiments
KAKTTKKRPQRADSDCFA

SEQ ID NO: 2818 - protein, 18 aa, Artificial Sequence
  Description of Artificial Sequence: Synthetic peptide
  N-term H or Acetyl
  MOD_RES (14)..(14): Ser or Phospho-Ser
  MOD_RES (16)..(16): Modified Cys
  See specification as filed for detailed description of substitutions and preferred embodiments
KAKTTKKRPQRADSDCFS

SEQ ID NO: 2819 - protein, 18 aa, Artificial Sequence
  Description of Artificial Sequence: Synthetic peptide
  N-term H or Acetyl
  MOD_RES (14)..(14): Ser or Phospho-Ser
  MOD_RES (16)..(16): Modified Cys
  See specification as filed for detailed description of substitutions and preferred embodiments
KAKTTKKRPQRADSNCFA

SEQ ID NO: 2820 - protein, 18 aa, Artificial Sequence
  Description of Artificial Sequence: Synthetic peptide
  N-term H or Acetyl
  MOD_RES (14)..(14): Ser or Phospho-Ser
  MOD_RES (16)..(16): Modified Cys
  See specification as filed for detailed description of substitutions and preferred embodiments
KAKTTKKRPQRADSNCFS

SEQ ID NO: 2821 - protein, 18 aa, Artificial Sequence
  Description of Artificial Sequence: Synthetic peptide
  N-term H or Acetyl
  MOD_RES (16)..(16): Modified Cys
  MOD_RES (18)..(18): Ser or Phospho-Ser
  See specification as filed for detailed description of substitutions and preferred embodiments
KAKTTKKRPQRADSDCFS

SEQ ID NO: 2822 - protein, 18 aa, Artificial Sequence
  Description of Artificial Sequence: Synthetic peptide
  N-term H or Acetyl
  MOD_RES (16)..(16): Modified Cys
  MOD_RES (18)..(18): Ser or Phospho-Ser
  See specification as filed for detailed description of substitutions and preferred embodiments
KAKTTKKRPQRADSNCFS

SEQ ID NO: 2823 - protein, 18 aa, Artificial Sequence
  Description of Artificial Sequence: Synthetic peptide
  N-term H or Acetyl
  MOD_RES (14)..(14): Ser or Phospho-Ser
  MOD_RES (16)..(16): Modified Cys
  See specification as filed for detailed description of substitutions and preferred embodiments
KAKTTKKRPQRAESDCFA

SEQ ID NO: 2824 - protein, 18 aa, Artificial Sequence
  Description of Artificial Sequence: Synthetic peptide
  N-term H or Acetyl
  MOD_RES (14)..(14): Ser or Phospho-Ser
  MOD_RES (16)..(16): Modified Cys
  See specification as filed for detailed description of substitutions and preferred embodiments
KAKTTKKRPQRAESDCFS

SEQ ID NO: 2825 - protein, 18 aa, Artificial Sequence
  Description of Artificial Sequence: Synthetic peptide
  N-term H or Acetyl
  MOD_RES (14)..(14): Ser or Phospho-Ser
  MOD_RES (16)..(16): Modified Cys
  See specification as filed for detailed description of substitutions and preferred embodiments
KAKTTKKRPQRAESNCFA

SEQ ID NO: 2826 - protein, 18 aa, Artificial Sequence
  Description of Artificial Sequence: Synthetic peptide
  N-term H or Acetyl
  MOD_RES (14)..(14): Ser or Phospho-Ser
  MOD_RES (16)..(16): Modified Cys
  See specification as filed for detailed description of substitutions and preferred embodiments
KAKTTKKRPQRAESNCFS

SEQ ID NO: 2827 - protein, 18 aa, Artificial Sequence
  Description of Artificial Sequence: Synthetic peptide
  N-term H or Acetyl
  MOD_RES (16)..(16): Modified Cys
  MOD_RES (18)..(18): Ser or Phospho-Ser
  See specification as filed for detailed description of substitutions and preferred embodiments
KAKTTKKRPQRAESDCFS

SEQ ID NO: 2828 - protein, 18 aa, Artificial Sequence
  Description of Artificial Sequence: Synthetic peptide
  N-term H or Acetyl
  MOD_RES (16)..(16): Modified Cys
  MOD_RES (18)..(18): Ser or Phospho-Ser
  See specification as filed for detailed description of substitutions and preferred embodiments
KAKTTKKRPQRAESNCFS

SEQ ID NO: 2829 - protein, 18 aa, Artificial Sequence
  Description of Artificial Sequence: Synthetic peptide
  N-term H or Acetyl
  MOD_RES (14)..(14): Ser or Phospho-Ser
  MOD_RES (16)..(16): Modified Cys
  See specification as filed for detailed description of substitutions and preferred embodiments
KAKTTKKRPQRAFSNCFS

SEQ ID NO: 2830 - protein, 18 aa, Artificial Sequence
  Description of Artificial Sequence: Synthetic peptide
  N-term H or Acetyl
  MOD_RES (16)..(16): Modified Cys
  MOD_RES (18)..(18): Ser or Phospho-Ser
  See specification as filed for detailed description of substitutions and preferred embodiments
KAKTTKKRPQRAFSNCFS

SEQ ID NO: 2831 - protein, 18 aa, Artificial Sequence
  Description of Artificial Sequence: Synthetic peptide
  N-term H or Acetyl
  MOD_RES (14)..(14): Ser or Phospho-Ser
  MOD_RES (16)..(16): Modified Cys
  See specification as filed for detailed description of substitutions and preferred embodiments
KAKTTKKRPQRAGSNCFS

SEQ ID NO: 2832 - protein, 18 aa, Artificial Sequence
  Description of Artificial Sequence: Synthetic peptide
  N-term H or Acetyl
  MOD_RES (16)..(16): Modified Cys
  MOD_RES (18)..(18): Ser or Phospho-Ser
  See specification as filed for detailed description of substitutions and preferred embodiments
KAKTTKKRPQRAGSNCFS

SEQ ID NO: 2833 - protein, 18 aa, Artificial Sequence
  Description of Artificial Sequence: Synthetic peptide
  N-term H or Acetyl
  MOD_RES (14)..(14): Ser or Phospho-Ser
  MOD_RES (16)..(16): Modified Cys
  See specification as filed for detailed description of substitutions and preferred embodiments
KAKTTKKRPQRAHSDCFA

SEQ ID NO: 2834 - protein, 18 aa, Artificial Sequence
  Description of Artificial Sequence: Synthetic peptide
  N-term H or Acetyl
  MOD_RES (14)..(14): Ser or Phospho-Ser
  MOD_RES (16)..(16): Modified Cys
  See specification as filed for detailed description of substitutions and preferred embodiments
KAKTTKKRPQRAHSDCFS

SEQ ID NO: 2835 - protein, 18 aa, Artificial Sequence
  Description of Artificial Sequence: Synthetic peptide
  N-term H or Acetyl
  MOD_RES (14)..(14): Ser or Phospho-Ser
  MOD_RES (16)..(16): Modified Cys
  See specification as filed for detailed description of substitutions and preferred embodiments
KAKTTKKRPQRAHSNCFA

SEQ ID NO: 2836 - protein, 18 aa, Artificial Sequence
  Description of Artificial Sequence: Synthetic peptide
  N-term H or Acetyl
  MOD_RES (14)..(14): Ser or Phospho-Ser
  MOD_RES (16)..(16): Modified Cys
  See specification as filed for detailed description of substitutions and preferred embodiments
KAKTTKKRPQRAHSNCFS

SEQ ID NO: 2837 - protein, 18 aa, Artificial Sequence
  Description of Artificial Sequence: Synthetic peptide
  N-term H or Acetyl
  MOD_RES (16)..(16): Modified Cys
  MOD_RES (18)..(18): Ser or Phospho-Ser
  See specification as filed for detailed description of substitutions and preferred embodiments
KAKTTKKRPQRAHSDCFS

SEQ ID NO: 2838 - protein, 18 aa, Artificial Sequence
  Description of Artificial Sequence: Synthetic peptide
  N-term H or Acetyl
  MOD_RES (16)..(16): Modified Cys
  MOD_RES (18)..(18): Ser or Phospho-Ser
  See specification as filed for detailed description of substitutions and preferred embodiments
KAKTTKKRPQRAHSNCFS

SEQ ID NO: 2839 - protein, 18 aa, Artificial Sequence
  Description of Artificial Sequence: Synthetic peptide
  N-term H or Acetyl
  MOD_RES (14)..(14): Ser or Phospho-Ser
  MOD_RES (16)..(16): Modified Cys
  See specification as filed for detailed description of substitutions and preferred embodiments
KAKTTKKRPQRAISNCFS

SEQ ID NO: 2840 - protein, 18 aa, Artificial Sequence
  Description of Artificial Sequence: Synthetic peptide
  N-term H or Acetyl
  MOD_RES (16)..(16): Modified Cys
  MOD_RES (18)..(18): Ser or Phospho-Ser
  See specification as filed for detailed description of substitutions and preferred embodiments
KAKTTKKRPQRAISNCFS

SEQ ID NO: 2841 - protein, 18 aa, Artificial Sequence
  Description of Artificial Sequence: Synthetic peptide
  N-term H or Acetyl
  MOD_RES (14)..(14): Ser or Phospho-Ser
  MOD_RES (16)..(16): Modified Cys
  See specification as filed for detailed description of substitutions and preferred embodiments
KAKTTKKRPQRAKSNCFS

SEQ ID NO: 2842 - protein, 18 aa, Artificial Sequence
  Description of Artificial Sequence: Synthetic peptide
  N-term H or Acetyl
  MOD_RES (16)..(16): Modified Cys
  MOD_RES (18)..(18): Ser or Phospho-Ser
  See specification as filed for detailed description of substitutions and preferred embodiments
KAKTTKKRPQRAKSNCFS

SEQ ID NO: 2843 - protein, 18 aa, Artificial Sequence
  Description of Artificial Sequence: Synthetic peptide
  N-term H or Acetyl
  MOD_RES (14)..(14): Ser or Phospho-Ser
  MOD_RES (16)..(16): Modified Cys
  See specification as filed for detailed description of substitutions and preferred embodiments
KAKTTKKRPQRALSNCFS

SEQ ID NO: 2844 - protein, 18 aa, Artificial Sequence
  Description of Artificial Sequence: Synthetic peptide
  N-term H or Acetyl
  MOD_RES (16)..(16): Modified Cys
  MOD_RES (18)..(18): Ser or Phospho-Ser
  See specification as filed for detailed description of substitutions and preferred embodiments
KAKTTKKRPQRALSNCFS

SEQ ID NO: 2845 - protein, 18 aa, Artificial Sequence
  Description of Artificial Sequence: Synthetic peptide
  N-term H or Acetyl
  MOD_RES (14)..(14): Ser or Phospho-Ser
  MOD_RES (16)..(16): Modified Cys
  See specification as filed for detailed description of substitutions and preferred embodiments
KAKTTKKRPQRANSNCFS

SEQ ID NO: 2846 - protein, 18 aa, Artificial Sequence
  Description of Artificial Sequence: Synthetic peptide
  N-term H or Acetyl
  MOD_RES (16)..(16): Modified Cys
  MOD_RES (18)..(18): Ser or Phospho-Ser
  See specification as filed for detailed description of substitutions and preferred embodiments
KAKTTKKRPQRANSNCFS

SEQ ID NO: 2847 - protein, 18 aa, Artificial Sequence
  Description of Artificial Sequence: Synthetic peptide
  N-term H or Acetyl
  MOD_RES (14)..(14): Ser or Phospho-Ser
  MOD_RES (16)..(16): Modified Cys
  See specification as filed for detailed description of substitutions and preferred embodiments
KAKTTKKRPQRAPSNCFS

SEQ ID NO: 2848 - protein, 18 aa, Artificial Sequence
  Description of Artificial Sequence: Synthetic peptide
  N-term H or Acetyl
  MOD_RES (16)..(16): Modified Cys
  MOD_RES (18)..(18): Ser or Phospho-Ser
  See specification as filed for detailed description of substitutions and preferred embodiments
KAKTTKKRPQRAPSNCFS

SEQ ID NO: 2849 - protein, 18 aa, Artificial Sequence
  Description of Artificial Sequence: Synthetic peptide
  N-term H or Acetyl
  MOD_RES (14)..(14): Ser or Phospho-Ser
  MOD_RES (16)..(16): Modified Cys
  See specification as filed for detailed description of substitutions and preferred embodiments
KAKTTKKRPQRARSNCFS

SEQ ID NO: 2850 - protein, 18 aa, Artificial Sequence
  Description of Artificial Sequence: Synthetic peptide
  N-term H or Acetyl
  MOD_RES (16)..(16): Modified Cys
  MOD_RES (18)..(18): Ser or Phospho-Ser
  See specification as filed for detailed description of substitutions and preferred embodiments
KAKTTKKRPQRARSNCFS

SEQ ID NO: 2851 - protein, 20 aa, Artificial Sequence
  Description of Artificial Sequence: Synthetic peptide
  N-term H or Acetyl
  MOD_RES (13)..(13): Thr or Phospho-Thr
  MOD_RES (15)..(15): Modified Cys
  See specification as filed for detailed description of substitutions and preferred embodiments
KAKTTKKRPQRATSCVFAMF

SEQ ID NO: 2852 - protein, 18 aa, Artificial Sequence
  Description of Artificial Sequence: Synthetic peptide
  N-term H or Acetyl
  MOD_RES (13)..(13): Thr or Phospho-Thr
  MOD_RES (15)..(15): Modified Cys
  See specification as filed for detailed description of substitutions and preferred embodiments
KAKTTKKRPQRATSCVFS

SEQ ID NO: 2853 - protein, 18 aa, Artificial Sequence
  Description of Artificial Sequence: Synthetic peptide
  N-term H or Acetyl
  MOD_RES (14)..(14): Ser or Phospho-Ser
  MOD_RES (15)..(15): Leu or Nle (i.e. isomer of Leucine)
  MOD_RES (16)..(16): Modified Cys
  See specification as filed for detailed description of substitutions and preferred embodiments
KAKTTKKRPQRATSLCFS

SEQ ID NO: 2854 - protein, 18 aa, Artificial Sequence
  Description of Artificial Sequence: Synthetic peptide
  N-term H or Acetyl
  MOD_RES (14)..(14): Ser or Phospho-Ser
  MOD_RES (16)..(16): Modified Cys
  See specification as filed for detailed description of substitutions and preferred embodiments
KAKTTKKRPQRATSDCFA

SEQ ID NO: 2855 - protein, 18 aa, Artificial Sequence
  Description of Artificial Sequence: Synthetic peptide
  N-term H or Acetyl
  MOD_RES (14)..(14): Ser or Phospho-Ser
  MOD_RES (16)..(16): Modified Cys
  See specification as filed for detailed description of substitutions and preferred embodiments
KAKTTKKRPQRATSDCFS

SEQ ID NO: 2856 - protein, 18 aa, Artificial Sequence
  Description of Artificial Sequence: Synthetic peptide
  N-term H or Acetyl
  MOD_RES (14)..(14): Ser or Phospho-Ser
  MOD_RES (16)..(16): Modified Cys
  See specification as filed for detailed description of substitutions and preferred embodiments
KAKTTKKRPQRATSECFS

SEQ ID NO: 2857 - protein, 18 aa, Artificial Sequence
  Description of Artificial Sequence: Synthetic peptide
  N-term H or Acetyl
  MOD_RES (14)..(14): Ser or Phospho-Ser
  MOD_RES (16)..(16): Modified Cys
  See specification as filed for detailed description of substitutions and preferred embodiments
KAKTTKKRPQRATSFCFS

SEQ ID NO: 2858 - protein, 18 aa, Artificial Sequence
  Description of Artificial Sequence: Synthetic peptide
  N-term H or Acetyl
  MOD_RES (14)..(14): Ser or Phospho-Ser
  MOD_RES (16)..(16): Modified Cys
  See specification as filed for detailed description of substitutions and preferred embodiments
KAKTTKKRPQRATSGCFS

SEQ ID NO: 2859 - protein, 18 aa, Artificial Sequence
  Description of Artificial Sequence: Synthetic peptide
  N-term H or Acetyl
  MOD_RES (14)..(14): Ser or Phospho-Ser
  MOD_RES (16)..(16): Modified Cys
  See specification as filed for detailed description of substitutions and preferred embodiments
KAKTTKKRPQRATSHCFS

SEQ ID NO: 2860 - protein, 18 aa, Artificial Sequence
  Description of Artificial Sequence: Synthetic peptide
  N-term H or Acetyl
  MOD_RES (14)..(14): Ser or Phospho-Ser
  MOD_RES (16)..(16): Modified Cys
  See specification as filed for detailed description of substitutions and preferred embodiments
KAKTTKKRPQRATSICFS

SEQ ID NO: 2861 - protein, 18 aa, Artificial Sequence
  Description of Artificial Sequence: Synthetic peptide
  N-term H or Acetyl
  MOD_RES (14)..(14): Ser or Phospho-Ser
  MOD_RES (16)..(16): Modified Cys
  See specification as filed for detailed description of substitutions and preferred embodiments
KAKTTKKRPQRATSKCFS

SEQ ID NO: 2862 - protein, 18 aa, Artificial Sequence
  Description of Artificial Sequence: Synthetic peptide
  N-term H or Acetyl
  MOD_RES (14)..(14): Ser or Phospho-Ser
  MOD_RES (16)..(16): Modified Cys
  See specification as filed for detailed description of substitutions and preferred embodiments
KAKTTKKRPQRATSLCFS

SEQ ID NO: 2863 - protein, 18 aa, Artificial Sequence
  Description of Artificial Sequence: Synthetic peptide
  N-term H or Acetyl
  MOD_RES (14)..(14): Ser or Phospho-Ser
  MOD_RES (16)..(16): Modified Cys
  MOD_RES (17)..(17): Leu or Nle (i.e. isomer of Leucine)
  See specification as filed for detailed description of substitutions and preferred embodiments
KAKTTKKRPQRATSNCLS

SEQ ID NO: 2864 - protein, 18 aa, Artificial Sequence
  Description of Artificial Sequence: Synthetic peptide
  N-term H or Acetyl
  MOD_RES (14)..(14): Ser or Phospho-Ser
  MOD_RES (16)..(16): Modified Cys
  See specification as filed for detailed description of substitutions and preferred embodiments
KAKTTKKRPQRATSNCDS

SEQ ID NO: 2865 - protein, 18 aa, Artificial Sequence
  Description of Artificial Sequence: Synthetic peptide
  N-term H or Acetyl
  MOD_RES (14)..(14): Ser or Phospho-Ser
  MOD_RES (16)..(16): Modified Cys
  See specification as filed for detailed description of substitutions and preferred embodiments
KAKTTKKRPQRATSNCES

SEQ ID NO: 2866 - protein, 18 aa, Artificial Sequence
  Description of Artificial Sequence: Synthetic peptide
  N-term H or Acetyl
  MOD_RES (14)..(14): Ser or Phospho-Ser
  MOD_RES (16)..(16): Modified Cys
  MOD_RES (18)..(18): Leu or Nle (i.e. isomer of Leucine)
  See specification as filed for detailed description of substitutions and preferred embodiments
KAKTTKKRPQRATSNCFL

SEQ ID NO: 2867 - protein, 18 aa, Artificial Sequence
  Description of Artificial Sequence: Synthetic peptide
  N-term H or Acetyl
  MOD_RES (14)..(14): Ser or Phospho-Ser
  MOD_RES (16)..(16): Modified Cys
  See specification as filed for detailed description of substitutions and preferred embodiments
KAKTTKKRPQRATSNCFA

SEQ ID NO: 2868 - protein, 18 aa, Artificial Sequence
  Description of Artificial Sequence: Synthetic peptide
  N-term H or Acetyl
  MOD_RES (14)..(14): Ser or Phospho-Ser
  MOD_RES (16)..(16): Modified Cys
  See specification as filed for detailed description of substitutions and preferred embodiments
KAKTTKKRPQRATSNCFD

SEQ ID NO: 2869 - protein, 18 aa, Artificial Sequence
  Description of Artificial Sequence: Synthetic peptide
  N-term H or Acetyl
  MOD_RES (14)..(14): Ser or Phospho-Ser
  MOD_RES (16)..(16): Modified Cys
  See specification as filed for detailed description of substitutions and preferred embodiments
KAKTTKKRPQRATSNCFE

SEQ ID NO: 2870 - protein, 18 aa, Artificial Sequence
  Description of Artificial Sequence: Synthetic peptide
  N-term H or Acetyl
  MOD_RES (14)..(14): Ser or Phospho-Ser
  MOD_RES (16)..(16): Modified Cys
  See specification as filed for detailed description of substitutions and preferred embodiments
KAKTTKKRPQRATSNCFF

SEQ ID NO: 2871 - protein, 18 aa, Artificial Sequence
  Description of Artificial Sequence: Synthetic peptide
  N-term H or Acetyl
  MOD_RES (14)..(14): Ser or Phospho-Ser
  MOD_RES (16)..(16): Modified Cys
  See specification as filed for detailed description of substitutions and preferred embodiments
KAKTTKKRPQRATSNCFG

SEQ ID NO: 2872 - protein, 18 aa, Artificial Sequence
  Description of Artificial Sequence: Synthetic peptide
  N-term H or Acetyl
  MOD_RES (14)..(14): Ser or Phospho-Ser
  MOD_RES (16)..(16): Modified Cys
  See specification as filed for detailed description of substitutions and preferred embodiments
KAKTTKKRPQRATSNCFH

SEQ ID NO: 2873 - protein, 18 aa, Artificial Sequence
  Description of Artificial Sequence: Synthetic peptide
  N-term H or Acetyl
  MOD_RES (14)..(14): Ser or Phospho-Ser
  MOD_RES (16)..(16): Modified Cys
  See specification as filed for detailed description of substitutions and preferred embodiments
KAKTTKKRPQRATSNCFI

SEQ ID NO: 2874 - protein, 18 aa, Artificial Sequence
  Description of Artificial Sequence: Synthetic peptide
  N-term H or Acetyl
  MOD_RES (14)..(14): Ser or Phospho-Ser
  MOD_RES (16)..(16): Modified Cys
  See specification as filed for detailed description of substitutions and preferred embodiments
KAKTTKKRPQRATSNCFK

SEQ ID NO: 2875 - protein, 18 aa, Artificial Sequence
  Description of Artificial Sequence: Synthetic peptide
  N-term H or Acetyl
  MOD_RES (14)..(14): Ser or Phospho-Ser
  MOD_RES (16)..(16): Modified Cys
  See specification as filed for detailed description of substitutions and preferred embodiments
KAKTTKKRPQRATSNCFL

SEQ ID NO: 2876 - protein, 18 aa, Artificial Sequence
  Description of Artificial Sequence: Synthetic peptide
  N-term H or Acetyl
  MOD_RES (14)..(14): Ser or Phospho-Ser
  MOD_RES (16)..(16): Modified Cys
  See specification as filed for detailed description of substitutions and preferred embodiments
KAKTTKKRPQRATSNCFN

SEQ ID NO: 2877 - protein, 18 aa, Artificial Sequence
  Description of Artificial Sequence: Synthetic peptide
  N-term H or Acetyl
  MOD_RES (14)..(14): Ser or Phospho-Ser
  MOD_RES (16)..(16): Modified Cys
  See specification as filed for detailed description of substitutions and preferred embodiments
KAKTTKKRPQRATSNCFP

SEQ ID NO: 2878 - protein, 18 aa, Artificial Sequence
  Description of Artificial Sequence: Synthetic peptide
  N-term H or Acetyl
  MOD_RES (14)..(14): Ser or Phospho-Ser
  MOD_RES (16)..(16): Modified Cys
  See specification as filed for detailed description of substitutions and preferred embodiments
KAKTTKKRPQRATSNCFR

SEQ ID NO: 2879 - protein, 18 aa, Artificial Sequence
  Description of Artificial Sequence: Synthetic peptide
  N-term H or Acetyl
  MOD_RES (14)..(14): Ser or Phospho-Ser
  MOD_RES (16)..(16): Modified Cys
  See specification as filed for detailed description of substitutions and preferred embodiments
KAKTTKKRPQRATSNCFS

SEQ ID NO: 2880 - protein, 18 aa, Artificial Sequence
  Description of Artificial Sequence: Synthetic peptide
  N-term H or Acetyl
  MOD_RES (14)..(14): Ser or Phospho-Ser
  MOD_RES (16)..(16): Modified Cys
  See specification as filed for detailed description of substitutions and preferred embodiments
KAKTTKKRPQRATSNCFV

SEQ ID NO: 2881 - protein, 18 aa, Artificial Sequence
  Description of Artificial Sequence: Synthetic peptide
  N-term H or Acetyl
  MOD_RES (14)..(14): Ser or Phospho-Ser
  MOD_RES (16)..(16): Modified Cys
  See specification as filed for detailed description of substitutions and preferred embodiments
KAKTTKKRPQRATSNCFW

SEQ ID NO: 2882 - protein, 17 aa, Artificial Sequence
  Description of Artificial Sequence: Synthetic peptide
  N-term H or Acetyl
  MOD_RES (14)..(14): Ser or Phospho-Ser
  MOD_RES (16)..(16): Modified Cys
  See specification as filed for detailed description of substitutions and preferred embodiments
KAKTTKKRPQRATSNCF

SEQ ID NO: 2883 - protein, 18 aa, Artificial Sequence
  Description of Artificial Sequence: Synthetic peptide
  N-term H or Acetyl
  MOD_RES (14)..(14): Ser or Phospho-Ser
  MOD_RES (16)..(16): Modified Cys
  See specification as filed for detailed description of substitutions and preferred embodiments
KAKTTKKRPQRATSNCGS

SEQ ID NO: 2884 - protein, 18 aa, Artificial Sequence
  Description of Artificial Sequence: Synthetic peptide
  N-term H or Acetyl
  MOD_RES (14)..(14): Ser or Phospho-Ser
  MOD_RES (16)..(16): Modified Cys
  See specification as filed for detailed description of substitutions and preferred embodiments
KAKTTKKRPQRATSNCHS

SEQ ID NO: 2885 - protein, 18 aa, Artificial Sequence
  Description of Artificial Sequence: Synthetic peptide
  N-term H or Acetyl
  MOD_RES (14)..(14): Ser or Phospho-Ser
  MOD_RES (16)..(16): Modified Cys
  See specification as filed for detailed description of substitutions and preferred embodiments
KAKTTKKRPQRATSNCIS

SEQ ID NO: 2886 - protein, 18 aa, Artificial Sequence
  Description of Artificial Sequence: Synthetic peptide
  N-term H or Acetyl
  MOD_RES (14)..(14): Ser or Phospho-Ser
  MOD_RES (16)..(16): Modified Cys
  See specification as filed for detailed description of substitutions and preferred embodiments
KAKTTKKRPQRATSNCKS

SEQ ID NO: 2887 - protein, 18 aa, Artificial Sequence
  Description of Artificial Sequence: Synthetic peptide
  N-term H or Acetyl
  MOD_RES (14)..(14): Ser or Phospho-Ser
  MOD_RES (16)..(16): Modified Cys
  See specification as filed for detailed description of substitutions and preferred embodiments
KAKTTKKRPQRATSNCLS

SEQ ID NO: 2888 - protein, 18 aa, Artificial Sequence
  Description of Artificial Sequence: Synthetic peptide
  N-term H or Acetyl
  MOD_RES (14)..(14): Ser or Phospho-Ser
  MOD_RES (16)..(16): Modified Cys
  See specification as filed for detailed description of substitutions and preferred embodiments
KAKTTKKRPQRATSNCNS

SEQ ID NO: 2889 - protein, 18 aa, Artificial Sequence
  Description of Artificial Sequence: Synthetic peptide
  N-term H or Acetyl
  MOD_RES (14)..(14): Ser or Phospho-Ser
  MOD_RES (16)..(16): Modified Cys
  See specification as filed for detailed description of substitutions and preferred embodiments
KAKTTKKRPQRATSNCPS

SEQ ID NO: 2890 - protein, 18 aa, Artificial Sequence
  Description of Artificial Sequence: Synthetic peptide
  N-term H or Acetyl
  MOD_RES (14)..(14): Ser or Phospho-Ser
  MOD_RES (16)..(16): Modified Cys
  See specification as filed for detailed description of substitutions and preferred embodiments
KAKTTKKRPQRATSNCRS

SEQ ID NO: 2891 - protein, 18 aa, Artificial Sequence
  Description of Artificial Sequence: Synthetic peptide
  N-term H or Acetyl
  MOD_RES (14)..(14): Ser or Phospho-Ser
  MOD_RES (16)..(16): Modified Cys
  See specification as filed for detailed description of substitutions and preferred embodiments
KAKTTKKRPQRATSNCVS

SEQ ID NO: 2892 - protein, 18 aa, Artificial Sequence
  Description of Artificial Sequence: Synthetic peptide
  N-term H or Acetyl
  MOD_RES (14)..(14): Ser or Phospho-Ser
  MOD_RES (16)..(16): Modified Cys
  See specification as filed for detailed description of substitutions and preferred embodiments
KAKTTKKRPQRATSNCWS

SEQ ID NO: 2893 - protein, 18 aa, Artificial Sequence
  Description of Artificial Sequence: Synthetic peptide
  N-term H or Acetyl
  MOD_RES (14)..(14): Ser or Phospho-Ser
  MOD_RES (16)..(16): Modified Cys
  See specification as filed for detailed description of substitutions and preferred embodiments
KAKTTKKRPQRATSPCFS

SEQ ID NO: 2894 - protein, 18 aa, Artificial Sequence
  Description of Artificial Sequence: Synthetic peptide
  N-term H or Acetyl
  MOD_RES (14)..(14): Ser or Phospho-Ser
  MOD_RES (16)..(16): Modified Cys
  See specification as filed for detailed description of substitutions and preferred embodiments
KAKTTKKRPQRATSRCFS

SEQ ID NO: 2895 - protein, 18 aa, Artificial Sequence
  Description of Artificial Sequence: Synthetic peptide
  N-term H or Acetyl
  MOD_RES (14)..(14): Ser or Phospho-Ser
  MOD_RES (16)..(16): Modified Cys
  See specification as filed for detailed description of substitutions and preferred embodiments
KAKTTKKRPQRATSVCFS

SEQ ID NO: 2896 - protein, 18 aa, Artificial Sequence
  Description of Artificial Sequence: Synthetic peptide
  N-term H or Acetyl
  MOD_RES (14)..(14): Ser or Phospho-Ser
  MOD_RES (16)..(16): Modified Cys
  See specification as filed for detailed description of substitutions and preferred embodiments
KAKTTKKRPQRATSWCFS

SEQ ID NO: 2897 - protein, 18 aa, Artificial Sequence
  Description of Artificial Sequence: Synthetic peptide
  N-term H or Acetyl
  MOD_RES (15)..(15): Leu or Nle (i.e. isomer of Leucine)
  MOD_RES (16)..(16): Modified Cys
  MOD_RES (18)..(18): Ser or Phospho-Ser
  See specification as filed for detailed description of substitutions and preferred embodiments
KAKTTKKRPQRATSLCFS

SEQ ID NO: 2898 - protein, 18 aa, Artificial Sequence
  Description of Artificial Sequence: Synthetic peptide
  N-term H or Acetyl
  MOD_RES (16)..(16): Modified Cys
  MOD_RES (18)..(18): Ser or Phospho-Ser
  See specification as filed for detailed description of substitutions and preferred embodiments
KAKTTKKRPQRATSDCFS

SEQ ID NO: 2899 - protein, 18 aa, Artificial Sequence
  Description of Artificial Sequence: Synthetic peptide
  N-term H or Acetyl
  MOD_RES (16)..(16): Modified Cys
  MOD_RES (18)..(18): Ser or Phospho-Ser
  See specification as filed for detailed description of substitutions and preferred embodiments
KAKTTKKRPQRATSECFS

SEQ ID NO: 2900 - protein, 18 aa, Artificial Sequence
  Description of Artificial Sequence: Synthetic peptide
  N-term H or Acetyl
  MOD_RES (16)..(16): Modified Cys
  MOD_RES (18)..(18): Ser or Phospho-Ser
  See specification as filed for detailed description of substitutions and preferred embodiments
KAKTTKKRPQRATSFCFS

SEQ ID NO: 2901 - protein, 18 aa, Artificial Sequence
  Description of Artificial Sequence: Synthetic peptide
  N-term H or Acetyl
  MOD_RES (16)..(16): Modified Cys
  MOD_RES (18)..(18): Ser or Phospho-Ser
  See specification as filed for detailed description of substitutions and preferred embodiments
KAKTTKKRPQRATSGCFS

SEQ ID NO: 2902 - protein, 18 aa, Artificial Sequence
  Description of Artificial Sequence: Synthetic peptide
  N-term H or Acetyl
  MOD_RES (16)..(16): Modified Cys
  MOD_RES (18)..(18): Ser or Phospho-Ser
  See specification as filed for detailed description of substitutions and preferred embodiments
KAKTTKKRPQRATSHCFS

SEQ ID NO: 2903 - protein, 18 aa, Artificial Sequence
  Description of Artificial Sequence: Synthetic peptide
  N-term H or Acetyl
  MOD_RES (16)..(16): Modified Cys
  MOD_RES (18)..(18): Ser or Phospho-Ser
  See specification as filed for detailed description of substitutions and preferred embodiments
KAKTTKKRPQRATSICFS

SEQ ID NO: 2904 - protein, 18 aa, Artificial Sequence
  Description of Artificial Sequence: Synthetic peptide
  N-term H or Acetyl
  MOD_RES (16)..(16): Modified Cys
  MOD_RES (18)..(18): Ser or Phospho-Ser
  See specification as filed for detailed description of substitutions and preferred embodiments
KAKTTKKRPQRATSKCFS

SEQ ID NO: 2905 - protein, 18 aa, Artificial Sequence
  Description of Artificial Sequence: Synthetic peptide
  N-term H or Acetyl
  MOD_RES (16)..(16): Modified Cys
  MOD_RES (18)..(18): Ser or Phospho-Ser
  See specification as filed for detailed description of substitutions and preferred embodiments
KAKTTKKRPQRATSLCFS

SEQ ID NO: 2906 - protein, 18 aa, Artificial Sequence
  Description of Artificial Sequence: Synthetic peptide
  N-term H or Acetyl
  MOD_RES (16)..(16): Modified Cys
  MOD_RES (18)..(18): Ser or Phospho-Ser
  See specification as filed for detailed description of substitutions and preferred embodiments
KAKTTKKRPQRATSNCDS

SEQ ID NO: 2907 - protein, 18 aa, Artificial Sequence
  Description of Artificial Sequence: Synthetic peptide
  N-term H or Acetyl
  MOD_RES (16)..(16): Modified Cys
  MOD_RES (18)..(18): Ser or Phospho-Ser
  See specification as filed for detailed description of substitutions and preferred embodiments
KAKTTKKRPQRATSNCES

SEQ ID NO: 2908 - protein, 18 aa, Artificial Sequence
  Description of Artificial Sequence: Synthetic peptide
  N-term H or Acetyl
  MOD_RES (16)..(16): Modified Cys
  MOD_RES (18)..(18): Ser or Phospho-Ser
  See specification as filed for detailed description of substitutions and preferred embodiments
KAKTTKKRPQRATSNCFS

SEQ ID NO: 2909 - protein, 18 aa, Artificial Sequence
  Description of Artificial Sequence: Synthetic peptide
  N-term H or Acetyl
  MOD_RES (16)..(16): Modified Cys
  MOD_RES (18)..(18): Ser or Phospho-Ser
  See specification as filed for detailed description of substitutions and preferred embodiments
KAKTTKKRPQRATSNCGS

SEQ ID NO: 2910 - protein, 18 aa, Artificial Sequence
  Description of Artificial Sequence: Synthetic peptide
  N-term H or Acetyl
  MOD_RES (16)..(16): Modified Cys
  MOD_RES (18)..(18): Ser or Phospho-Ser
  See specification as filed for detailed description of substitutions and preferred embodiments
KAKTTKKRPQRATSNCHS

SEQ ID NO: 2911 - protein, 18 aa, Artificial Sequence
  Description of Artificial Sequence: Synthetic peptide
  N-term H or Acetyl
  MOD_RES (16)..(16): Modified Cys
  MOD_RES (18)..(18): Ser or Phospho-Ser
  See specification as filed for detailed description of substitutions and preferred embodiments
KAKTTKKRPQRATSNCIS

SEQ ID NO: 2912 - protein, 18 aa, Artificial Sequence
  Description of Artificial Sequence: Synthetic peptide
  N-term H or Acetyl
  MOD_RES (16)..(16): Modified Cys
  MOD_RES (18)..(18): Ser or Phospho-Ser
  See specification as filed for detailed description of substitutions and preferred embodiments
KAKTTKKRPQRATSNCKS

SEQ ID NO: 2913 - protein, 18 aa, Artificial Sequence
  Description of Artificial Sequence: Synthetic peptide
  N-term H or Acetyl
  MOD_RES (16)..(16): Modified Cys
  MOD_RES (18)..(18): Ser or Phospho-Ser
  See specification as filed for detailed description of substitutions and preferred embodiments
KAKTTKKRPQRATSNCLS

SEQ ID NO: 2914 - protein, 18 aa, Artificial Sequence
  Description of Artificial Sequence: Synthetic peptide
  N-term H or Acetyl
  MOD_RES (16)..(16): Modified Cys
  MOD_RES (18)..(18): Ser or Phospho-Ser
  See specification as filed for detailed description of substitutions and preferred embodiments
KAKTTKKRPQRATSNCNS

SEQ ID NO: 2915 - protein, 18 aa, Artificial Sequence
  Description of Artificial Sequence: Synthetic peptide
  N-term H or Acetyl
  MOD_RES (16)..(16): Modified Cys
  MOD_RES (18)..(18): Ser or Phospho-Ser
  See specification as filed for detailed description of substitutions and preferred embodiments
KAKTTKKRPQRATSNCPS

SEQ ID NO: 2916 - protein, 18 aa, Artificial Sequence
  Description of Artificial Sequence: Synthetic peptide
  N-term H or Acetyl
  MOD_RES (16)..(16): Modified Cys
  MOD_RES (18)..(18): Ser or Phospho-Ser
  See specification as filed for detailed description of substitutions and preferred embodiments
KAKTTKKRPQRATSNCRS

SEQ ID NO: 2917 - protein, 18 aa, Artificial Sequence
  Description of Artificial Sequence: Synthetic peptide
  N-term H or Acetyl
  MOD_RES (16)..(16): Modified Cys
  MOD_RES (18)..(18): Ser or Phospho-Ser
  See specification as filed for detailed description of substitutions and preferred embodiments
KAKTTKKRPQRATSNCVS

SEQ ID NO: 2918 - protein, 18 aa, Artificial Sequence
  Description of Artificial Sequence: Synthetic peptide
  N-term H or Acetyl
  MOD_RES (16)..(16): Modified Cys
  MOD_RES (18)..(18): Ser or Phospho-Ser
  See specification as filed for detailed description of substitutions and preferred embodiments
KAKTTKKRPQRATSNCWS

SEQ ID NO: 2919 - protein, 18 aa, Artificial Sequence
  Description of Artificial Sequence: Synthetic peptide
  N-term H or Acetyl
  MOD_RES (16)..(16): Modified Cys
  MOD_RES (18)..(18): Ser or Phospho-Ser
  See specification as filed for detailed description of substitutions and preferred embodiments
KAKTTKKRPQRATSPCFS

SEQ ID NO: 2920 - protein, 18 aa, Artificial Sequence
  Description of Artificial Sequence: Synthetic peptide
  N-term H or Acetyl
  MOD_RES (16)..(16): Modified Cys
  MOD_RES (18)..(18): Ser or Phospho-Ser
  See specification as filed for detailed description of substitutions and preferred embodiments
KAKTTKKRPQRATSRCFS

SEQ ID NO: 2921 - protein, 18 aa, Artificial Sequence
  Description of Artificial Sequence: Synthetic peptide
  N-term H or Acetyl
  MOD_RES (16)..(16): Modified Cys
  MOD_RES (18)..(18): Ser or Phospho-Ser
  See specification as filed for detailed description of substitutions and preferred embodiments
KAKTTKKRPQRATSVCFS

SEQ ID NO: 2922 - protein, 18 aa, Artificial Sequence
  Description of Artificial Sequence: Synthetic peptide
  N-term H or Acetyl
  MOD_RES (16)..(16): Modified Cys
  MOD_RES (18)..(18): Ser or Phospho-Ser
  See specification as filed for detailed description of substitutions and preferred embodiments
KAKTTKKRPQRATSWCFS

SEQ ID NO: 2923 - protein, 18 aa, Artificial Sequence
  Description of Artificial Sequence: Synthetic peptide
  N-term H or Acetyl
  MOD_RES (14)..(14): Ser or Phospho-Ser
  MOD_RES (16)..(16): Modified Cys
  See specification as filed for detailed description of substitutions and preferred embodiments
KAKTTKKRPQRAVSNCFS

SEQ ID NO: 2924 - protein, 18 aa, Artificial Sequence
  Description of Artificial Sequence: Synthetic peptide
  N-term H or Acetyl
  MOD_RES (16)..(16): Modified Cys
  MOD_RES (18)..(18): Ser or Phospho-Ser
  See specification as filed for detailed description of substitutions and preferred embodiments
KAKTTKKRPQRAVSNCFS

SEQ ID NO: 2925 - protein, 18 aa, Artificial Sequence
  Description of Artificial Sequence: Synthetic peptide
  N-term H or Acetyl
  MOD_RES (14)..(14): Ser or Phospho-Ser
  MOD_RES (16)..(16): Modified Cys
  See specification as filed for detailed description of substitutions and preferred embodiments
KAKTTKKRPQRAWSNCFS

SEQ ID NO: 2926 - protein, 18 aa, Artificial Sequence
  Description of Artificial Sequence: Synthetic peptide
  N-term H or Acetyl
  MOD_RES (16)..(16): Modified Cys
  MOD_RES (18)..(18): Ser or Phospho-Ser
  See specification as filed for detailed description of substitutions and preferred embodiments
KAKTTKKRPQRAWSNCFS

SEQ ID NO: 2927 - protein, 18 aa, Artificial Sequence
  Description of Artificial Sequence: Synthetic peptide
  N-term H or Acetyl
  MOD_RES (14)..(14): Ser or Phospho-Ser
  MOD_RES (16)..(16): Modified Cys
  See specification as filed for detailed description of substitutions and preferred embodiments
KAKTTKKRPQRDTSNCFS

SEQ ID NO: 2928 - protein, 18 aa, Artificial Sequence
  Description of Artificial Sequence: Synthetic peptide
  N-term H or Acetyl
  MOD_RES (16)..(16): Modified Cys
  MOD_RES (18)..(18): Ser or Phospho-Ser
  See specification as filed for detailed description of substitutions and preferred embodiments
KAKTTKKRPQRDTSNCFS

SEQ ID NO: 2929 - protein, 18 aa, Artificial Sequence
  Description of Artificial Sequence: Synthetic peptide
  N-term H or Acetyl
  MOD_RES (14)..(14): Ser or Phospho-Ser
  MOD_RES (16)..(16): Modified Cys
  See specification as filed for detailed description of substitutions and preferred embodiments
KAKTTKKRPQRETSNCFS

SEQ ID NO: 2930 - protein, 18 aa, Artificial Sequence
  Description of Artificial Sequence: Synthetic peptide
  N-term H or Acetyl
  MOD_RES (16)..(16): Modified Cys
  MOD_RES (18)..(18): Ser or Phospho-Ser
  See specification as filed for detailed description of substitutions and preferred embodiments
KAKTTKKRPQRETSNCFS

SEQ ID NO: 2931 - protein, 18 aa, Artificial Sequence
  Description of Artificial Sequence: Synthetic peptide
  N-term H or Acetyl
  MOD_RES (14)..(14): Ser or Phospho-Ser
  MOD_RES (16)..(16): Modified Cys
  See specification as filed for detailed description of substitutions and preferred embodiments
KAKTTKKRPQRFTSNCFS

SEQ ID NO: 2932 - protein, 18 aa, Artificial Sequence
  Description of Artificial Sequence: Synthetic peptide
  N-term H or Acetyl
  MOD_RES (16)..(16): Modified Cys
  MOD_RES (18)..(18): Ser or Phospho-Ser
  See specification as filed for detailed description of substitutions and preferred embodiments
KAKTTKKRPQRFTSNCFS

SEQ ID NO: 2933 - protein, 18 aa, Artificial Sequence
  Description of Artificial Sequence: Synthetic peptide
  N-term H or Acetyl
  MOD_RES (14)..(14): Ser or Phospho-Ser
  MOD_RES (16)..(16): Modified Cys
  See specification as filed for detailed description of substitutions and preferred embodiments
KAKTTKKRPQRGTSNCFS

SEQ ID NO: 2934 - protein, 18 aa, Artificial Sequence
  Description of Artificial Sequence: Synthetic peptide
  N-term H or Acetyl
  MOD_RES (16)..(16): Modified Cys
  MOD_RES (18)..(18): Ser or Phospho-Ser
  See specification as filed for detailed description of substitutions and preferred embodiments
KAKTTKKRPQRGTSNCFS

SEQ ID NO: 2935 - protein, 18 aa, Artificial Sequence
  Description of Artificial Sequence: Synthetic peptide
  N-term H or Acetyl
  MOD_RES (14)..(14): Ser or Phospho-Ser
  MOD_RES (16)..(16): Modified Cys
  See specification as filed for detailed description of substitutions and preferred embodiments
KAKTTKKRPQRHTSNCFS

SEQ ID NO: 2936 - protein, 18 aa, Artificial Sequence
  Description of Artificial Sequence: Synthetic peptide
  N-term H or Acetyl
  MOD_RES (16)..(16): Modified Cys
  MOD_RES (18)..(18): Ser or Phospho-Ser
  See specification as filed for detailed description of substitutions and preferred embodiments
KAKTTKKRPQRHTSNCFS

SEQ ID NO: 2937 - protein, 18 aa, Artificial Sequence
  Description of Artificial Sequence: Synthetic peptide
  N-term H or Acetyl
  MOD_RES (14)..(14): Ser or Phospho-Ser
  MOD_RES (16)..(16): Modified Cys
  See specification as filed for detailed description of substitutions and preferred embodiments
KAKTTKKRPQRITSNCFS

SEQ ID NO: 2938 - protein, 18 aa, Artificial Sequence
  Description of Artificial Sequence: Synthetic peptide
  N-term H or Acetyl
  MOD_RES (16)..(16): Modified Cys
  MOD_RES (18)..(18): Ser or Phospho-Ser
  See specification as filed for detailed description of substitutions and preferred embodiments
KAKTTKKRPQRITSNCFS

SEQ ID NO: 2939 - protein, 18 aa, Artificial Sequence
  Description of Artificial Sequence: Synthetic peptide
  N-term H or Acetyl
  MOD_RES (14)..(14): Ser or Phospho-Ser
  MOD_RES (16)..(16): Modified Cys
  See specification as filed for detailed description of substitutions and preferred embodiments
KAKTTKKRPQRKTSNCFS

SEQ ID NO: 2940 - protein, 18 aa, Artificial Sequence
  Description of Artificial Sequence: Synthetic peptide
  N-term H or Acetyl
  MOD_RES (16)..(16): Modified Cys
  MOD_RES (18)..(18): Ser or Phospho-Ser
  See specification as filed for detailed description of substitutions and preferred embodiments
KAKTTKKRPQRKTSNCFS

SEQ ID NO: 2941 - protein, 18 aa, Artificial Sequence
  Description of Artificial Sequence: Synthetic peptide
  N-term H or Acetyl
  MOD_RES (14)..(14): Ser or Phospho-Ser
  MOD_RES (16)..(16): Modified Cys
  See specification as filed for detailed description of substitutions and preferred embodiments
KAKTTKKRPQRLTSNCFS

SEQ ID NO: 2942 - protein, 18 aa, Artificial Sequence
  Description of Artificial Sequence: Synthetic peptide
  N-term H or Acetyl
  MOD_RES (16)..(16): Modified Cys
  MOD_RES (18)..(18): Ser or Phospho-Ser
  See specification as filed for detailed description of substitutions and preferred embodiments
KAKTTKKRPQRLTSNCFS

SEQ ID NO: 2943 - protein, 18 aa, Artificial Sequence
  Description of Artificial Sequence: Synthetic peptide
  N-term H or Acetyl
  MOD_RES (14)..(14): Ser or Phospho-Ser
  MOD_RES (16)..(16): Modified Cys
  See specification as filed for detailed description of substitutions and preferred embodiments
KAKTTKKRPQRNTSNCFS

SEQ ID NO: 2944 - protein, 18 aa, Artificial Sequence
  Description of Artificial Sequence: Synthetic peptide
  N-term H or Acetyl
  MOD_RES (16)..(16): Modified Cys
  MOD_RES (18)..(18): Ser or Phospho-Ser
  See specification as filed for detailed description of substitutions and preferred embodiments
KAKTTKKRPQRNTSNCFS

SEQ ID NO: 2945 - protein, 18 aa, Artificial Sequence
  Description of Artificial Sequence: Synthetic peptide
  N-term H or Acetyl
  MOD_RES (14)..(14): Ser or Phospho-Ser
  MOD_RES (16)..(16): Modified Cys
  See specification as filed for detailed description of substitutions and preferred embodiments
KAKTTKKRPQRPTSNCFS

SEQ ID NO: 2946 - protein, 18 aa, Artificial Sequence
  Description of Artificial Sequence: Synthetic peptide
  N-term H or Acetyl
  MOD_RES (16)..(16): Modified Cys
  MOD_RES (18)..(18): Ser or Phospho-Ser
  See specification as filed for detailed description of substitutions and preferred embodiments
KAKTTKKRPQRPTSNCFS

SEQ ID NO: 2947 - protein, 18 aa, Artificial Sequence
  Description of Artificial Sequence: Synthetic peptide
  N-term H or Acetyl
  MOD_RES (14)..(14): Ser or Phospho-Ser
  MOD_RES (16)..(16): Modified Cys
  See specification as filed for detailed description of substitutions and preferred embodiments
KAKTTKKRPQRRTSNCFS

SEQ ID NO: 2948 - protein, 18 aa, Artificial Sequence
  Description of Artificial Sequence: Synthetic peptide
  N-term H or Acetyl
  MOD_RES (16)..(16): Modified Cys
  MOD_RES (18)..(18): Ser or Phospho-Ser
  See specification as filed for detailed description of substitutions and preferred embodiments
KAKTTKKRPQRRTSNCFS

SEQ ID NO: 2949 - protein, 18 aa, Artificial Sequence
  Description of Artificial Sequence: Synthetic peptide
  N-term H or Acetyl
  MOD_RES (14)..(14): Ser or Phospho-Ser
  MOD_RES (16)..(16): Modified Cys
  See specification as filed for detailed description of substitutions and preferred embodiments
KAKTTKKRPQRVTSNCFS

SEQ ID NO: 2950 - protein, 18 aa, Artificial Sequence
  Description of Artificial Sequence: Synthetic peptide
  N-term H or Acetyl
  MOD_RES (16)..(16): Modified Cys
  MOD_RES (18)..(18): Ser or Phospho-Ser
  See specification as filed for detailed description of substitutions and preferred embodiments
KAKTTKKRPQRVTSNCFS

SEQ ID NO: 2951 - protein, 18 aa, Artificial Sequence
  Description of Artificial Sequence: Synthetic peptide
  N-term H or Acetyl
  MOD_RES (14)..(14): Ser or Phospho-Ser
  MOD_RES (16)..(16): Modified Cys
  See specification as filed for detailed description of substitutions and preferred embodiments
KAKTTKKRPQRWTSNCFS

SEQ ID NO: 2952 - protein, 18 aa, Artificial Sequence
  Description of Artificial Sequence: Synthetic peptide
  N-term H or Acetyl
  MOD_RES (16)..(16): Modified Cys
  MOD_RES (18)..(18): Ser or Phospho-Ser
  See specification as filed for detailed description of substitutions and preferred embodiments
KAKTTKKRPQRWTSNCFS

SEQ ID NO: 2953 - protein, 18 aa, Artificial Sequence
  Description of Artificial Sequence: Synthetic peptide
  N-term H or Acetyl
  MOD_RES (14)..(14): Ser or Phospho-Ser
  MOD_RES (16)..(16): Modified Cys
  See specification as filed for detailed description of substitutions and preferred embodiments
KAKTTKKRPQVATSNCFS

SEQ ID NO: 2954 - protein, 18 aa, Artificial Sequence
  Description of Artificial Sequence: Synthetic peptide
  N-term H or Acetyl
  MOD_RES (16)..(16): Modified Cys
  MOD_RES (18)..(18): Ser or Phospho-Ser
  See specification as filed for detailed description of substitutions and preferred embodiments
KAKTTKKRPQVATSNCFS

SEQ ID NO: 2955 - protein, 18 aa, Artificial Sequence
  Description of Artificial Sequence: Synthetic peptide
  N-term H or Acetyl
  MOD_RES (14)..(14): Ser or Phospho-Ser
  MOD_RES (16)..(16): Modified Cys
  See specification as filed for detailed description of substitutions and preferred embodiments
KAKTTKKRPQWATSNCFS

SEQ ID NO: 2956 - protein, 18 aa, Artificial Sequence
  Description of Artificial Sequence: Synthetic peptide
  N-term H or Acetyl
  MOD_RES (16)..(16): Modified Cys
  MOD_RES (18)..(18): Ser or Phospho-Ser
  See specification as filed for detailed description of substitutions and preferred embodiments
KAKTTKKRPQWATSNCFS

SEQ ID NO: 2957 - protein, 18 aa, Artificial Sequence
  Description of Artificial Sequence: Synthetic peptide
  N-term H or Acetyl
  MOD_RES (14)..(14): Ser or Phospho-Ser
  MOD_RES (16)..(16): Modified Cys
  See specification as filed for detailed description of substitutions and preferred embodiments
KAKTTKKRPRRATSNCFS

SEQ ID NO: 2958 - protein, 18 aa, Artificial Sequence
  Description of Artificial Sequence: Synthetic peptide
  N-term H or Acetyl
  MOD_RES (16)..(16): Modified Cys
  MOD_RES (18)..(18): Ser or Phospho-Ser
  See specification as filed for detailed description of substitutions and preferred embodiments
KAKTTKKRPRRATSNCFS

SEQ ID NO: 2959 - protein, 18 aa, Artificial Sequence
  Description of Artificial Sequence: Synthetic peptide
  N-term H or Acetyl
  MOD_RES (14)..(14): Ser or Phospho-Ser
  MOD_RES (16)..(16): Modified Cys
  See specification as filed for detailed description of substitutions and preferred embodiments
KAKTTKKRPVRATSNCFS

SEQ ID NO: 2960 - protein, 18 aa, Artificial Sequence
  Description of Artificial Sequence: Synthetic peptide
  N-term H or Acetyl
  MOD_RES (16)..(16): Modified Cys
  MOD_RES (18)..(18): Ser or Phospho-Ser
  See specification as filed for detailed description of substitutions and preferred embodiments
KAKTTKKRPVRATSNCFS

SEQ ID NO: 2961 - protein, 18 aa, Artificial Sequence
  Description of Artificial Sequence: Synthetic peptide
  N-term H or Acetyl
  MOD_RES (14)..(14): Ser or Phospho-Ser
  MOD_RES (16)..(16): Modified Cys
  See specification as filed for detailed description of substitutions and preferred embodiments
KAKTTKKRPWRATSNCFS

SEQ ID NO: 2962 - protein, 18 aa, Artificial Sequence
  Description of Artificial Sequence: Synthetic peptide
  N-term H or Acetyl
  MOD_RES (16)..(16): Modified Cys
  MOD_RES (18)..(18): Ser or Phospho-Ser
  See specification as filed for detailed description of substitutions and preferred embodiments
KAKTTKKRPWRATSNCFS

SEQ ID NO: 2963 - protein, 18 aa, Artificial Sequence
  Description of Artificial Sequence: Synthetic peptide
  N-term H or Acetyl
  MOD_RES (14)..(14): Ser or Phospho-Ser
  MOD_RES (16)..(16): Modified Cys
  See specification as filed for detailed description of substitutions and preferred embodiments
KAKTTKKRRQRATSNCFS

SEQ ID NO: 2964 - protein, 18 aa, Artificial Sequence
  Description of Artificial Sequence: Synthetic peptide
  N-term H or Acetyl
  MOD_RES (16)..(16): Modified Cys
  MOD_RES (18)..(18): Ser or Phospho-Ser
  See specification as filed for detailed description of substitutions and preferred embodiments
KAKTTKKRRQRATSNCFS

SEQ ID NO: 2965 - protein, 18 aa, Artificial Sequence
  Description of Artificial Sequence: Synthetic peptide
  N-term H or Acetyl
  MOD_RES (14)..(14): Ser or Phospho-Ser
  MOD_RES (16)..(16): Modified Cys
  See specification as filed for detailed description of substitutions and preferred embodiments
KAKTTKKRVQRATSNCFS

SEQ ID NO: 2966 - protein, 18 aa, Artificial Sequence
  Description of Artificial Sequence: Synthetic peptide
  N-term H or Acetyl
  MOD_RES (16)..(16): Modified Cys
  MOD_RES (18)..(18): Ser or Phospho-Ser
  See specification as filed for detailed description of substitutions and preferred embodiments
KAKTTKKRVQRATSNCFS

SEQ ID NO: 2967 - protein, 18 aa, Artificial Sequence
  Description of Artificial Sequence: Synthetic peptide
  N-term H or Acetyl
  MOD_RES (14)..(14): Ser or Phospho-Ser
  MOD_RES (16)..(16): Modified Cys
  See specification as filed for detailed description of substitutions and preferred embodiments
KAKTTKKRWQRATSNCFS

SEQ ID NO: 2968 - protein, 18 aa, Artificial Sequence
  Description of Artificial Sequence: Synthetic peptide
  N-term H or Acetyl
  MOD_RES (16)..(16): Modified Cys
  MOD_RES (18)..(18): Ser or Phospho-Ser
  See specification as filed for detailed description of substitutions and preferred embodiments
KAKTTKKRWQRATSNCFS

SEQ ID NO: 2969 - protein, 18 aa, Artificial Sequence
  Description of Artificial Sequence: Synthetic peptide
  N-term H or Acetyl
  MOD_RES (14)..(14): Ser or Phospho-Ser
  MOD_RES (16)..(16): Modified Cys
  See specification as filed for detailed description of substitutions and preferred embodiments
KAKTTKKVPQRATSNCFS

SEQ ID NO: 2970 - protein, 18 aa, Artificial Sequence
  Description of Artificial Sequence: Synthetic peptide
  N-term H or Acetyl
  MOD_RES (16)..(16): Modified Cys
  MOD_RES (18)..(18): Ser or Phospho-Ser
  See specification as filed for detailed description of substitutions and preferred embodiments
KAKTTKKVPQRATSNCFS

SEQ ID NO: 2971 - protein, 18 aa, Artificial Sequence
  Description of Artificial Sequence: Synthetic peptide
  N-term H or Acetyl
  MOD_RES (14)..(14): Ser or Phospho-Ser
  MOD_RES (16)..(16): Modified Cys
  See specification as filed for detailed description of substitutions and preferred embodiments
KAKTTKKWPQRATSNCFS

SEQ ID NO: 2972 - protein, 18 aa, Artificial Sequence
  Description of Artificial Sequence: Synthetic peptide
  N-term H or Acetyl
  MOD_RES (16)..(16): Modified Cys
  MOD_RES (18)..(18): Ser or Phospho-Ser
  See specification as filed for detailed description of substitutions and preferred embodiments
KAKTTKKWPQRATSNCFS

SEQ ID NO: 2973 - protein, 18 aa, Artificial Sequence
  Description of Artificial Sequence: Synthetic peptide
  N-term H or Acetyl
  MOD_RES (14)..(14): Ser or Phospho-Ser
  MOD_RES (16)..(16): Modified Cys
  See specification as filed for detailed description of substitutions and preferred embodiments
KAKTTKLRPQRATSNCFS

SEQ ID NO: 2974 - protein, 18 aa, Artificial Sequence
  Description of Artificial Sequence: Synthetic peptide
  N-term H or Acetyl
  MOD_RES (16)..(16): Modified Cys
  MOD_RES (18)..(18): Ser or Phospho-Ser
  See specification as filed for detailed description of substitutions and preferred embodiments
KAKTTKLRPQRATSNCFS

SEQ ID NO: 2975 - protein, 18 aa, Artificial Sequence
  Description of Artificial Sequence: Synthetic peptide
  N-term H or Acetyl
  MOD_RES (14)..(14): Ser or Phospho-Ser
  MOD_RES (16)..(16): Modified Cys
  See specification as filed for detailed description of substitutions and preferred embodiments
KAKTTKNRPQRATSNCFS

SEQ ID NO: 2976 - protein, 18 aa, Artificial Sequence
  Description of Artificial Sequence: Synthetic peptide
  N-term H or Acetyl
  MOD_RES (16)..(16): Modified Cys
  MOD_RES (18)..(18): Ser or Phospho-Ser
  See specification as filed for detailed description of substitutions and preferred embodiments
KAKTTKNRPQRATSNCFS

SEQ ID NO: 2977 - protein, 18 aa, Artificial Sequence
  Description of Artificial Sequence: Synthetic peptide
  N-term H or Acetyl
  MOD_RES (14)..(14): Ser or Phospho-Ser
  MOD_RES (16)..(16): Modified Cys
  See specification as filed for detailed description of substitutions and preferred embodiments
KAKTTKPRPQRATSNCFS

SEQ ID NO: 2978 - protein, 18 aa, Artificial Sequence
  Description of Artificial Sequence: Synthetic peptide
  N-term H or Acetyl
  MOD_RES (16)..(16): Modified Cys
  MOD_RES (18)..(18): Ser or Phospho-Ser
  See specification as filed for detailed description of substitutions and preferred embodiments
KAKTTKPRPQRATSNCFS

SEQ ID NO: 2979 - protein, 18 aa, Artificial Sequence
  Description of Artificial Sequence: Synthetic peptide
  N-term H or Acetyl
  MOD_RES (14)..(14): Ser or Phospho-Ser
  MOD_RES (16)..(16): Modified Cys
  See specification as filed for detailed description of substitutions and preferred embodiments
KAKTTKRRPQRATSNCFS

SEQ ID NO: 2980 - protein, 18 aa, Artificial Sequence
  Description of Artificial Sequence: Synthetic peptide
  N-term H or Acetyl
  MOD_RES (16)..(16): Modified Cys
  MOD_RES (18)..(18): Ser or Phospho-Ser
  See specification as filed for detailed description of substitutions and preferred embodiments
KAKTTKRRPQRATSNCFS

SEQ ID NO: 2981 - protein, 18 aa, Artificial Sequence
  Description of Artificial Sequence: Synthetic peptide
  N-term H or Acetyl
  MOD_RES (14)..(14): Ser or Phospho-Ser
  MOD_RES (16)..(16): Modified Cys
  See specification as filed for detailed description of substitutions and preferred embodiments
KAKTTKVRPQRATSNCFS

SEQ ID NO: 2982 - protein, 18 aa, Artificial Sequence
  Description of Artificial Sequence: Synthetic peptide
  N-term H or Acetyl
  MOD_RES (16)..(16): Modified Cys
  MOD_RES (18)..(18): Ser or Phospho-Ser
  See specification as filed for detailed description of substitutions and preferred embodiments
KAKTTKVRPQRATSNCFS

SEQ ID NO: 2983 - protein, 18 aa, Artificial Sequence
  Description of Artificial Sequence: Synthetic peptide
  N-term H or Acetyl
  MOD_RES (14)..(14): Ser or Phospho-Ser
  MOD_RES (16)..(16): Modified Cys
  See specification as filed for detailed description of substitutions and preferred embodiments
KAKTTKWRPQRATSNCFS

SEQ ID NO: 2984 - protein, 18 aa, Artificial Sequence
  Description of Artificial Sequence: Synthetic peptide
  N-term H or Acetyl
  MOD_RES (16)..(16): Modified Cys
  MOD_RES (18)..(18): Ser or Phospho-Ser
  See specification as filed for detailed description of substitutions and preferred embodiments
KAKTTKWRPQRATSNCFS

SEQ ID NO: 2985 - protein, 18 aa, Artificial Sequence
  Description of Artificial Sequence: Synthetic peptide
  N-term H or Acetyl
  MOD_RES (14)..(14): Ser or Phospho-Ser
  MOD_RES (16)..(16): Modified Cys
  See specification as filed for detailed description of substitutions and preferred embodiments
KAKTTLKRPQRATSNCFS

SEQ ID NO: 2986 - protein, 18 aa, Artificial Sequence
  Description of Artificial Sequence: Synthetic peptide
  N-term H or Acetyl
  MOD_RES (16)..(16): Modified Cys
  MOD_RES (18)..(18): Ser or Phospho-Ser
  See specification as filed for detailed description of substitutions and preferred embodiments
KAKTTLKRPQRATSNCFS

SEQ ID NO: 2987 - protein, 18 aa, Artificial Sequence
  Description of Artificial Sequence: Synthetic peptide
  N-term H or Acetyl
  MOD_RES (14)..(14): Ser or Phospho-Ser
  MOD_RES (16)..(16): Modified Cys
  See specification as filed for detailed description of substitutions and preferred embodiments
KAKTTNKRPQRATSNCFS

SEQ ID NO: 2988 - protein, 18 aa, Artificial Sequence
  Description of Artificial Sequence: Synthetic peptide
  N-term H or Acetyl
  MOD_RES (16)..(16): Modified Cys
  MOD_RES (18)..(18): Ser or Phospho-Ser
  See specification as filed for detailed description of substitutions and preferred embodiments
KAKTTNKRPQRATSNCFS

SEQ ID NO: 2989 - protein, 18 aa, Artificial Sequence
  Description of Artificial Sequence: Synthetic peptide
  N-term H or Acetyl
  MOD_RES (14)..(14): Ser or Phospho-Ser
  MOD_RES (16)..(16): Modified Cys
  See specification as filed for detailed description of substitutions and preferred embodiments
KAKTTPKRPQRATSNCFS

SEQ ID NO: 2990 - protein, 18 aa, Artificial Sequence
  Description of Artificial Sequence: Synthetic peptide
  N-term H or Acetyl
  MOD_RES (16)..(16): Modified Cys
  MOD_RES (18)..(18): Ser or Phospho-Ser
  See specification as filed for detailed description of substitutions and preferred embodiments
KAKTTPKRPQRATSNCFS

SEQ ID NO: 2991 - protein, 18 aa, Artificial Sequence
  Description of Artificial Sequence: Synthetic peptide
  N-term H or Acetyl
  MOD_RES (14)..(14): Ser or Phospho-Ser
  MOD_RES (16)..(16): Modified Cys
  See specification as filed for detailed description of substitutions and preferred embodiments
KAKTTRKRPQRATSNCFS

SEQ ID NO: 2992 - protein, 18 aa, Artificial Sequence
  Description of Artificial Sequence: Synthetic peptide
  N-term H or Acetyl
  MOD_RES (16)..(16): Modified Cys
  MOD_RES (18)..(18): Ser or Phospho-Ser
  See specification as filed for detailed description of substitutions and preferred embodiments
KAKTTRKRPQRATSNCFS

SEQ ID NO: 2993 - protein, 18 aa, Artificial Sequence
  Description of Artificial Sequence: Synthetic peptide
  N-term H or Acetyl
  MOD_RES (14)..(14): Ser or Phospho-Ser
  MOD_RES (16)..(16): Modified Cys
  See specification as filed for detailed description of substitutions and preferred embodiments
KAKTTVKRPQRATSNCFS

SEQ ID NO: 2994 - protein, 18 aa, Artificial Sequence
  Description of Artificial Sequence: Synthetic peptide
  N-term H or Acetyl
  MOD_RES (16)..(16): Modified Cys
  MOD_RES (18)..(18): Ser or Phospho-Ser
  See specification as filed for detailed description of substitutions and preferred embodiments
KAKTTVKRPQRATSNCFS

SEQ ID NO: 2995 - protein, 18 aa, Artificial Sequence
  Description of Artificial Sequence: Synthetic peptide
  N-term H or Acetyl
  MOD_RES (14)..(14): Ser or Phospho-Ser
  MOD_RES (16)..(16): Modified Cys
  See specification as filed for detailed description of substitutions and preferred embodiments
KAKTTWKRPQRATSNCFS

SEQ ID NO: 2996 - protein, 18 aa, Artificial Sequence
  Description of Artificial Sequence: Synthetic peptide
  N-term H or Acetyl
  MOD_RES (16)..(16): Modified Cys
  MOD_RES (18)..(18): Ser or Phospho-Ser
  See specification as filed for detailed description of substitutions and preferred embodiments
KAKTTWKRPQRATSNCFS

SEQ ID NO: 2997 - protein, 18 aa, Artificial Sequence
  Description of Artificial Sequence: Synthetic peptide
  N-term H or Acetyl
  MOD_RES (14)..(14): Ser or Phospho-Ser
  MOD_RES (16)..(16): Modified Cys
  See specification as filed for detailed description of substitutions and preferred embodiments
KAKTVKKRPQRADSDCFA

SEQ ID NO: 2998 - protein, 18 aa, Artificial Sequence
  Description of Artificial Sequence: Synthetic peptide
  N-term H or Acetyl
  MOD_RES (14)..(14): Ser or Phospho-Ser
  MOD_RES (16)..(16): Modified Cys
  See specification as filed for detailed description of substitutions and preferred embodiments
KAKTVKKRPQRADSDCFS

SEQ ID NO: 2999 - protein, 18 aa, Artificial Sequence
  Description of Artificial Sequence: Synthetic peptide
  N-term H or Acetyl
  MOD_RES (14)..(14): Ser or Phospho-Ser
  MOD_RES (16)..(16): Modified Cys
  See specification as filed for detailed description of substitutions and preferred embodiments
KAKTVKKRPQRADSNCFA

SEQ ID NO: 3000 - protein, 18 aa, Artificial Sequence
  Description of Artificial Sequence: Synthetic peptide
  N-term H or Acetyl
  MOD_RES (14)..(14): Ser or Phospho-Ser
  MOD_RES (16)..(16): Modified Cys
  See specification as filed for detailed description of substitutions and preferred embodiments
KAKTVKKRPQRADSNCFS

SEQ ID NO: 3001 - protein, 18 aa, Artificial Sequence
  Description of Artificial Sequence: Synthetic peptide
  N-term H or Acetyl
  MOD_RES (16)..(16): Modified Cys
  MOD_RES (18)..(18): Ser or Phospho-Ser
  See specification as filed for detailed description of substitutions and preferred embodiments
KAKTVKKRPQRADSDCFS

SEQ ID NO: 3002 - protein, 18 aa, Artificial Sequence
  Description of Artificial Sequence: Synthetic peptide
  N-term H or Acetyl
  MOD_RES (16)..(16): Modified Cys
  MOD_RES (18)..(18): Ser or Phospho-Ser
  See specification as filed for detailed description of substitutions and preferred embodiments
KAKTVKKRPQRADSNCFS

SEQ ID NO: 3003 - protein, 18 aa, Artificial Sequence
  Description of Artificial Sequence: Synthetic peptide
  N-term H or Acetyl
  MOD_RES (14)..(14): Ser or Phospho-Ser
  MOD_RES (16)..(16): Modified Cys
  See specification as filed for detailed description of substitutions and preferred embodiments
KAKTVKKRPQRAESDCFA

SEQ ID NO: 3004 - protein, 18 aa, Artificial Sequence
  Description of Artificial Sequence: Synthetic peptide
  N-term H or Acetyl
  MOD_RES (14)..(14): Ser or Phospho-Ser
  MOD_RES (16)..(16): Modified Cys
  See specification as filed for detailed description of substitutions and preferred embodiments
KAKTVKKRPQRAESDCFS

SEQ ID NO: 3005 - protein, 18 aa, Artificial Sequence
  Description of Artificial Sequence: Synthetic peptide
  N-term H or Acetyl
  MOD_RES (14)..(14): Ser or Phospho-Ser
  MOD_RES (16)..(16): Modified Cys
  See specification as filed for detailed description of substitutions and preferred embodiments
KAKTVKKRPQRAESNCFA

SEQ ID NO: 3006 - protein, 18 aa, Artificial Sequence
  Description of Artificial Sequence: Synthetic peptide
  N-term H or Acetyl
  MOD_RES (14)..(14): Ser or Phospho-Ser
  MOD_RES (16)..(16): Modified Cys
  See specification as filed for detailed description of substitutions and preferred embodiments
KAKTVKKRPQRAESNCFS

SEQ ID NO: 3007 - protein, 18 aa, Artificial Sequence
  Description of Artificial Sequence: Synthetic peptide
  N-term H or Acetyl
  MOD_RES (16)..(16): Modified Cys
  MOD_RES (18)..(18): Ser or Phospho-Ser
  See specification as filed for detailed description of substitutions and preferred embodiments
KAKTVKKRPQRAESDCFS

SEQ ID NO: 3008 - protein, 18 aa, Artificial Sequence
  Description of Artificial Sequence: Synthetic peptide
  N-term H or Acetyl
  MOD_RES (16)..(16): Modified Cys
  MOD_RES (18)..(18): Ser or Phospho-Ser
  See specification as filed for detailed description of substitutions and preferred embodiments
KAKTVKKRPQRAESNCFS

SEQ ID NO: 3009 - protein, 18 aa, Artificial Sequence
  Description of Artificial Sequence: Synthetic peptide
  N-term H or Acetyl
  MOD_RES (14)..(14): Ser or Phospho-Ser
  MOD_RES (16)..(16): Modified Cys
  See specification as filed for detailed description of substitutions and preferred embodiments
KAKTVKKRPQRAHSDCFA

SEQ ID NO: 3010 - protein, 18 aa, Artificial Sequence
  Description of Artificial Sequence: Synthetic peptide
  N-term H or Acetyl
  MOD_RES (14)..(14): Ser or Phospho-Ser
  MOD_RES (16)..(16): Modified Cys
  See specification as filed for detailed description of substitutions and preferred embodiments
KAKTVKKRPQRAHSDCFS

SEQ ID NO: 3011 - protein, 18 aa, Artificial Sequence
  Description of Artificial Sequence: Synthetic peptide
  N-term H or Acetyl
  MOD_RES (14)..(14): Ser or Phospho-Ser
  MOD_RES (16)..(16): Modified Cys
  See specification as filed for detailed description of substitutions and preferred embodiments
KAKTVKKRPQRAHSNCFA

SEQ ID NO: 3012 - protein, 18 aa, Artificial Sequence
  Description of Artificial Sequence: Synthetic peptide
  N-term H or Acetyl
  MOD_RES (14)..(14): Ser or Phospho-Ser
  MOD_RES (16)..(16): Modified Cys
  See specification as filed for detailed description of substitutions and preferred embodiments
KAKTVKKRPQRAHSNCFS

SEQ ID NO: 3013 - protein, 18 aa, Artificial Sequence
  Description of Artificial Sequence: Synthetic peptide
  N-term H or Acetyl
  MOD_RES (16)..(16): Modified Cys
  MOD_RES (18)..(18): Ser or Phospho-Ser
  See specification as filed for detailed description of substitutions and preferred embodiments
KAKTVKKRPQRAHSDCFS

SEQ ID NO: 3014 - protein, 18 aa, Artificial Sequence
  Description of Artificial Sequence: Synthetic peptide
  N-term H or Acetyl
  MOD_RES (16)..(16): Modified Cys
  MOD_RES (18)..(18): Ser or Phospho-Ser
  See specification as filed for detailed description of substitutions and preferred embodiments
KAKTVKKRPQRAHSNCFS

SEQ ID NO: 3015 - protein, 18 aa, Artificial Sequence
  Description of Artificial Sequence: Synthetic peptide
  N-term H or Acetyl
  MOD_RES (14)..(14): Ser or Phospho-Ser
  MOD_RES (16)..(16): Modified Cys
  See specification as filed for detailed description of substitutions and preferred embodiments
KAKTVKKRPQRATSDCFA

SEQ ID NO: 3016 - protein, 18 aa, Artificial Sequence
  Description of Artificial Sequence: Synthetic peptide
  N-term H or Acetyl
  MOD_RES (14)..(14): Ser or Phospho-Ser
  MOD_RES (16)..(16): Modified Cys
  See specification as filed for detailed description of substitutions and preferred embodiments
KAKTVKKRPQRATSDCFS

SEQ ID NO: 3017 - protein, 18 aa, Artificial Sequence
  Description of Artificial Sequence: Synthetic peptide
  N-term H or Acetyl
  MOD_RES (14)..(14): Ser or Phospho-Ser
  MOD_RES (16)..(16): Modified Cys
  See specification as filed for detailed description of substitutions and preferred embodiments
KAKTVKKRPQRATSNCFA

SEQ ID NO: 3018 - protein, 18 aa, Artificial Sequence
  Description of Artificial Sequence: Synthetic peptide
  N-term H or Acetyl
  MOD_RES (14)..(14): Ser or Phospho-Ser
  MOD_RES (16)..(16): Modified Cys
  See specification as filed for detailed description of substitutions and preferred embodiments
KAKTVKKRPQRATSNCFS

SEQ ID NO: 3019 - protein, 18 aa, Artificial Sequence
  Description of Artificial Sequence: Synthetic peptide
  N-term H or Acetyl
  MOD_RES (16)..(16): Modified Cys
  MOD_RES (18)..(18): Ser or Phospho-Ser
  See specification as filed for detailed description of substitutions and preferred embodiments
KAKTVKKRPQRATSDCFS

SEQ ID NO: 3020 - protein, 18 aa, Artificial Sequence
  Description of Artificial Sequence: Synthetic peptide
  N-term H or Acetyl
  MOD_RES (16)..(16): Modified Cys
  MOD_RES (18)..(18): Ser or Phospho-Ser
  See specification as filed for detailed description of substitutions and preferred embodiments
KAKTVKKRPQRATSNCFS

SEQ ID NO: 3021 - protein, 18 aa, Artificial Sequence
  Description of Artificial Sequence: Synthetic peptide
  N-term H or Acetyl
  MOD_RES (14)..(14): Ser or Phospho-Ser
  MOD_RES (16)..(16): Modified Cys
  See specification as filed for detailed description of substitutions and preferred embodiments
KAKTWKKRPQRATSNCFS

SEQ ID NO: 3022 - protein, 18 aa, Artificial Sequence
  Description of Artificial Sequence: Synthetic peptide
  N-term H or Acetyl
  MOD_RES (16)..(16): Modified Cys
  MOD_RES (18)..(18): Ser or Phospho-Ser
  See specification as filed for detailed description of substitutions and preferred embodiments
KAKTWKKRPQRATSNCFS

SEQ ID NO: 3023 - protein, 18 aa, Artificial Sequence
  Description of Artificial Sequence: Synthetic peptide
  N-term H or Acetyl
  MOD_RES (14)..(14): Ser or Phospho-Ser
  MOD_RES (16)..(16): Modified Cys
  See specification as filed for detailed description of substitutions and preferred embodiments
KAKVTKKRPQRATSNCFS

SEQ ID NO: 3024 - protein, 18 aa, Artificial Sequence
  Description of Artificial Sequence: Synthetic peptide
  N-term H or Acetyl
  MOD_RES (16)..(16): Modified Cys
  MOD_RES (18)..(18): Ser or Phospho-Ser
  See specification as filed for detailed description of substitutions and preferred embodiments
KAKVTKKRPQRATSNCFS

SEQ ID NO: 3025 - protein, 18 aa, Artificial Sequence
  Description of Artificial Sequence: Synthetic peptide
  N-term H or Acetyl
  MOD_RES (14)..(14): Ser or Phospho-Ser
  MOD_RES (16)..(16): Modified Cys
  See specification as filed for detailed description of substitutions and preferred embodiments
KAKWTKKRPQRATSNCFS

SEQ ID NO: 3026 - protein, 18 aa, Artificial Sequence
  Description of Artificial Sequence: Synthetic peptide
  N-term H or Acetyl
  MOD_RES (16)..(16): Modified Cys
  MOD_RES (18)..(18): Ser or Phospho-Ser
  See specification as filed for detailed description of substitutions and preferred embodiments
KAKWTKKRPQRATSNCFS

SEQ ID NO: 3027 - protein, 18 aa, Artificial Sequence
  Description of Artificial Sequence: Synthetic peptide
  N-term H or Acetyl
  MOD_RES (14)..(14): Ser or Phospho-Ser
  MOD_RES (16)..(16): Modified Cys
  See specification as filed for detailed description of substitutions and preferred embodiments
KALTTKKRPQRATSNCFS

SEQ ID NO: 3028 - protein, 18 aa, Artificial Sequence
  Description of Artificial Sequence: Synthetic peptide
  N-term H or Acetyl
  MOD_RES (16)..(16): Modified Cys
  MOD_RES (18)..(18): Ser or Phospho-Ser
  See specification as filed for detailed description of substitutions and preferred embodiments
KALTTKKRPQRATSNCFS

SEQ ID NO: 3029 - protein, 20 aa, Artificial Sequence
  Description of Artificial Sequence: Synthetic peptide
  N-term H or Acetyl
  MOD_RES (8)..(8): Modified Cys
  MOD_RES (10)..(10): Thr or Phospho-Thr
  See specification as filed for detailed description of substitutions and preferred embodiments
KANPLMACGTLTRRHQNGRF

SEQ ID NO: 3030 - protein, 18 aa, Artificial Sequence
  Description of Artificial Sequence: Synthetic peptide
  N-term H or Acetyl
  MOD_RES (14)..(14): Ser or Phospho-Ser
  MOD_RES (16)..(16): Modified Cys
  See specification as filed for detailed description of substitutions and preferred embodiments
KANTTKKRPQRATSNCFS

SEQ ID NO: 3031 - protein, 18 aa, Artificial Sequence
  Description of Artificial Sequence: Synthetic peptide
  N-term H or Acetyl
  MOD_RES (16)..(16): Modified Cys
  MOD_RES (18)..(18): Ser or Phospho-Ser
  See specification as filed for detailed description of substitutions and preferred embodiments
KANTTKKRPQRATSNCFS

SEQ ID NO: 3032 - protein, 18 aa, Artificial Sequence
  Description of Artificial Sequence: Synthetic peptide
  N-term H or Acetyl
  MOD_RES (14)..(14): Ser or Phospho-Ser
  MOD_RES (16)..(16): Modified Cys
  See specification as filed for detailed description of substitutions and preferred embodiments
KAPTTKKRPQRATSNCFS

SEQ ID NO: 3033 - protein, 18 aa, Artificial Sequence
  Description of Artificial Sequence: Synthetic peptide
  N-term H or Acetyl
  MOD_RES (16)..(16): Modified Cys
  MOD_RES (18)..(18): Ser or Phospho-Ser
  See specification as filed for detailed description of substitutions and preferred embodiments
KAPTTKKRPQRATSNCFS

SEQ ID NO: 3034 - protein, 18 aa, Artificial Sequence
  Description of Artificial Sequence: Synthetic peptide
  N-term H or Acetyl
  MOD_RES (14)..(14): Ser or Phospho-Ser
  MOD_RES (16)..(16): Modified Cys
  See specification as filed for detailed description of substitutions and preferred embodiments
KARTTKKRPQRATSNCFS

SEQ ID NO: 3035 - protein, 18 aa, Artificial Sequence
  Description of Artificial Sequence: Synthetic peptide
  N-term H or Acetyl
  MOD_RES (16)..(16): Modified Cys
  MOD_RES (18)..(18): Ser or Phospho-Ser
  See specification as filed for detailed description of substitutions and preferred embodiments
KARTTKKRPQRATSNCFS

SEQ ID NO: 3036 - protein, 18 aa, Artificial Sequence
  Description of Artificial Sequence: Synthetic peptide
  N-term H or Acetyl
  MOD_RES (14)..(14): Ser or Phospho-Ser
  MOD_RES (16)..(16): Modified Cys
  See specification as filed for detailed description of substitutions and preferred embodiments
KAVTTKKRPQRATSNCFS

SEQ ID NO: 3037 - protein, 18 aa, Artificial Sequence
  Description of Artificial Sequence: Synthetic peptide
  N-term H or Acetyl
  MOD_RES (16)..(16): Modified Cys
  MOD_RES (18)..(18): Ser or Phospho-Ser
  See specification as filed for detailed description of substitutions and preferred embodiments
KAVTTKKRPQRATSNCFS

SEQ ID NO: 3038 - protein, 18 aa, Artificial Sequence
  Description of Artificial Sequence: Synthetic peptide
  N-term H or Acetyl
  MOD_RES (14)..(14): Ser or Phospho-Ser
  MOD_RES (16)..(16): Modified Cys
  See specification as filed for detailed description of substitutions and preferred embodiments
KAWTTKKRPQRATSNCFS

SEQ ID NO: 3039 - protein, 18 aa, Artificial Sequence
  Description of Artificial Sequence: Synthetic peptide
  N-term H or Acetyl
  MOD_RES (16)..(16): Modified Cys
  MOD_RES (18)..(18): Ser or Phospho-Ser
  See specification as filed for detailed description of substitutions and preferred embodiments
KAWTTKKRPQRATSNCFS

SEQ ID NO: 3040 - protein, 10 aa, Artificial Sequence
  Description of Artificial Sequence: Synthetic peptide
  N-term H or Acetyl
  MOD_RES (2)..(2): Modified Cys
  MOD_RES (4)..(4): Ser or Phospho-Ser
  See specification as filed for detailed description of substitutions and preferred embodiments
KCDSLRRKAK

SEQ ID NO: 3041 - protein, 10 aa, Artificial Sequence
  Description of Artificial Sequence: Synthetic peptide
  N-term H or Acetyl
  MOD_RES (2)..(2): Modified Cys
  MOD_RES (4)..(4): Ser or Phospho-Ser
  See specification as filed for detailed description of substitutions and preferred embodiments
KCHSLPRGNK

SEQ ID NO: 3042 - protein, 8 aa, Artificial Sequence
  Description of Artificial Sequence: Synthetic peptide
  N-term H or Acetyl
  MOD_RES (2)..(2): Modified Cys
  MOD_RES (4)..(4): Ser or Phospho-Ser
  See specification as filed for detailed description of substitutions and preferred embodiments
KCLSPGPF

SEQ ID NO: 3043 - protein, 15 aa, Artificial Sequence
  Description of Artificial Sequence: Synthetic peptide
  N-term H or Acetyl
  MOD_RES (6)..(6): Modified Cys
  MOD_RES (8)..(8): Thr or Phospho-Thr
  See specification as filed for detailed description of substitutions and preferred embodiments
KDEILCTTPISEQKG

SEQ ID NO: 3044 - protein, 15 aa, Artificial Sequence
  Description of Artificial Sequence: Synthetic peptide
  N-term H or Acetyl
  MOD_RES (8)..(8): Thr or Phospho-Thr
  MOD_RES (10)..(10): Modified Cys
  See specification as filed for detailed description of substitutions and preferred embodiments
KDEILPTTPCSEQKG

SEQ ID NO: 3045 - protein, 18 aa, Artificial Sequence
  Description of Artificial Sequence: Synthetic peptide
  N-term H or Acetyl
  MOD_RES (14)..(14): Ser or Phospho-Ser
  MOD_RES (16)..(16): Modified Cys
  See specification as filed for detailed description of substitutions and preferred embodiments
KDKTTKKRPQRATSNCFS

SEQ ID NO: 3046 - protein, 18 aa, Artificial Sequence
  Description of Artificial Sequence: Synthetic peptide
  N-term H or Acetyl
  MOD_RES (16)..(16): Modified Cys
  MOD_RES (18)..(18): Ser or Phospho-Ser
  See specification as filed for detailed description of substitutions and preferred embodiments
KDKTTKKRPQRATSNCFS

SEQ ID NO: 3047 - protein, 15 aa, Artificial Sequence
  Description of Artificial Sequence: Synthetic peptide
  N-term H or Acetyl
  MOD_RES (8)..(8): Thr or Phospho-Thr
  MOD_RES (10)..(10): Modified Cys
  See specification as filed for detailed description of substitutions and preferred embodiments
KDRPQRATSCVFAMF

SEQ ID NO: 3048 - protein, 18 aa, Artificial Sequence
  Description of Artificial Sequence: Synthetic peptide
  N-term H or Acetyl
  MOD_RES (8)..(8): Thr or Phospho-Thr
  MOD_RES (10)..(10): Modified Cys
  See specification as filed for detailed description of substitutions and preferred embodiments
KEEQSQITSCVTGQIGWR

SEQ ID NO: 3049 - protein, 18 aa, Artificial Sequence
  Description of Artificial Sequence: Synthetic peptide
  N-term H or Acetyl
  MOD_RES (10)..(10): Modified Cys
  MOD_RES (12)..(12): Thr or Phospho-Thr
  See specification as filed for detailed description of substitutions and preferred embodiments
KEEQSQITSCVTGQIGWR

SEQ ID NO: 3050 - protein, 18 aa, Artificial Sequence
  Description of Artificial Sequence: Synthetic peptide
  N-term H or Acetyl
  MOD_RES (12)..(12): Thr or Phospho-Thr
  MOD_RES (14)..(14): Modified Cys
  See specification as filed for detailed description of substitutions and preferred embodiments
KEEQSQITSQVTGCIGWR

SEQ ID NO: 3051 - protein, 18 aa, Artificial Sequence
  Description of Artificial Sequence: Synthetic peptide
  N-term H or Acetyl
  MOD_RES (12)..(12): Thr or Phospho-Thr
  MOD_RES (15)..(15): Modified Cys
  See specification as filed for detailed description of substitutions and preferred embodiments
KEEQSQITSQVTGQCGWR

SEQ ID NO: 3052 - protein, 15 aa, Artificial Sequence
  Description of Artificial Sequence: Synthetic peptide
  N-term H or Acetyl
  MOD_RES (6)..(6): Modified Cys
  MOD_RES (8)..(8): Ser or Phospho-Ser
  See specification as filed for detailed description of substitutions and preferred embodiments
KEHRGCDSPDPDTSY

SEQ ID NO: 3053 - protein, 19 aa, Artificial Sequence
  Description of Artificial Sequence: Synthetic peptide
  N-term H or Acetyl
  MOD_RES (10)..(10): Modified Cys
  MOD_RES (12)..(12): Thr or Phospho-Thr
  See specification as filed for detailed description of substitutions and preferred embodiments
KEKKAVSPLCLTTTNSSEG

SEQ ID NO: 3054 - protein, 19 aa, Artificial Sequence
  Description of Artificial Sequence: Synthetic peptide
  N-term H or Acetyl
  MOD_RES (11)..(11): Modified Cys
  MOD_RES (13)..(13): Thr or Phospho-Thr
  See specification as filed for detailed description of substitutions and preferred embodiments
KEKKAVSPLLCTTTNSSEG

SEQ ID NO: 3055 - protein, 19 aa, Artificial Sequence
  Description of Artificial Sequence: Synthetic peptide
  N-term H or Acetyl
  MOD_RES (12)..(12): Modified Cys
  MOD_RES (14)..(14): Thr or Phospho-Thr
  See specification as filed for detailed description of substitutions and preferred embodiments
KEKKAVSPLLLCTTNSSEG

SEQ ID NO: 3056 - protein, 19 aa, Artificial Sequence
  Description of Artificial Sequence: Synthetic peptide
  N-term H or Acetyl
  MOD_RES (12)..(12): Thr or Phospho-Thr
  MOD_RES (14)..(14): Modified Cys
  See specification as filed for detailed description of substitutions and preferred embodiments
KEKKAVSPLLLTTCNSSEG

SEQ ID NO: 3057 - protein, 19 aa, Artificial Sequence
  Description of Artificial Sequence: Synthetic peptide
  N-term H or Acetyl
  MOD_RES (13)..(13): Thr or Phospho-Thr
  MOD_RES (15)..(15): Modified Cys
  See specification as filed for detailed description of substitutions and preferred embodiments
KEKKAVSPLLLTTTCSSEG

SEQ ID NO: 3058 - protein, 19 aa, Artificial Sequence
  Description of Artificial Sequence: Synthetic peptide
  N-term H or Acetyl
  MOD_RES (14)..(14): Modified Cys
  MOD_RES (16)..(16): Ser or Phospho-Ser
  See specification as filed for detailed description of substitutions and preferred embodiments
KEKKAVSPLLLTTCNSSEG

SEQ ID NO: 3059 - protein, 19 aa, Artificial Sequence
  Description of Artificial Sequence: Synthetic peptide
  N-term H or Acetyl
  MOD_RES (14)..(14): Thr or Phospho-Thr
  MOD_RES (16)..(16): Modified Cys
  See specification as filed for detailed description of substitutions and preferred embodiments
KEKKAVSPLLLTTTNCSEG

SEQ ID NO: 3060 - protein, 19 aa, Artificial Sequence
  Description of Artificial Sequence: Synthetic peptide
  N-term H or Acetyl
  MOD_RES (15)..(15): Modified Cys
  MOD_RES (17)..(17): Ser or Phospho-Ser
  See specification as filed for detailed description of substitutions and preferred embodiments
KEKKAVSPLLLTTTCSSEG

SEQ ID NO: 3061 - protein, 18 aa, Artificial Sequence
  Description of Artificial Sequence: Synthetic peptide
  N-term H or Acetyl
  MOD_RES (14)..(14): Ser or Phospho-Ser
  MOD_RES (16)..(16): Modified Cys
  See specification as filed for detailed description of substitutions and preferred embodiments
KEKTTKKRPQRATSNCFS

SEQ ID NO: 3062 - protein, 18 aa, Artificial Sequence
  Description of Artificial Sequence: Synthetic peptide
  N-term H or Acetyl
  MOD_RES (16)..(16): Modified Cys
  MOD_RES (18)..(18): Ser or Phospho-Ser
  See specification as filed for detailed description of substitutions and preferred embodiments
KEKTTKKRPQRATSNCFS

SEQ ID NO: 3063 - protein, 15 aa, Artificial Sequence
  Description of Artificial Sequence: Synthetic peptide
  N-term H or Acetyl
  MOD_RES (8)..(8): Thr or Phospho-Thr
  MOD_RES (10)..(10): Modified Cys
  See specification as filed for detailed description of substitutions and preferred embodiments
KERPQRATSCVFAMF

SEQ ID NO: 3064 - protein, 19 aa, Artificial Sequence
  Description of Artificial Sequence: Synthetic peptide
  N-term H or Acetyl
  MOD_RES (8)..(8): Ser or Phospho-Ser
  MOD_RES (10)..(10): Modified Cys
  MOD_RES (16)..(16): Leu or Nle (i.e. isomer of Leucine)
  See specification as filed for detailed description of substitutions and preferred embodiments
KEVPRRKSLCGTPYWLAPE

SEQ ID NO: 3065 - protein, 19 aa, Artificial Sequence
  Description of Artificial Sequence: Synthetic peptide
  N-term H or Acetyl
  MOD_RES (10)..(10): Modified Cys
  MOD_RES (12)..(12): Thr or Phospho-Thr
  MOD_RES (16)..(16): Leu or Nle (i.e. isomer of Leucine)
  See specification as filed for detailed description of substitutions and preferred embodiments
KEVPRRKSLCGTPYWLAPE

SEQ ID NO: 3066 - protein, 9 aa, Artificial Sequence
  Description of Artificial Sequence: Synthetic peptide
  N-term H or Acetyl
  MOD_RES (3)..(3): Modified Cys
  MOD_RES (5)..(5): Thr or Phospho-Thr
  See specification as filed for detailed description of substitutions and preferred embodiments
KFCKTFKWM

SEQ ID NO: 3067 - protein, 9 aa, Artificial Sequence
  Description of Artificial Sequence: Synthetic peptide
  N-term H or Acetyl
  MOD_RES (5)..(5): Thr or Phospho-Thr
  MOD_RES (7)..(7): Modified Cys
  See specification as filed for detailed description of substitutions and preferred embodiments
KFFKTFCWM

SEQ ID NO: 3068 - protein, 18 aa, Artificial Sequence
  Description of Artificial Sequence: Synthetic peptide
  N-term H or Acetyl
  MOD_RES (14)..(14): Ser or Phospho-Ser
  MOD_RES (16)..(16): Modified Cys
  See specification as filed for detailed description of substitutions and preferred embodiments
KFKTTKKRPQRATSNCFS

SEQ ID NO: 3069 - protein, 18 aa, Artificial Sequence
  Description of Artificial Sequence: Synthetic peptide
  N-term H or Acetyl
  MOD_RES (16)..(16): Modified Cys
  MOD_RES (18)..(18): Ser or Phospho-Ser
  See specification as filed for detailed description of substitutions and preferred embodiments
KFKTTKKRPQRATSNCFS

SEQ ID NO: 3070 - protein, 15 aa, Artificial Sequence
  Description of Artificial Sequence: Synthetic peptide
  N-term H or Acetyl
  MOD_RES (8)..(8): Thr or Phospho-Thr
  MOD_RES (10)..(10): Modified Cys
  See specification as filed for detailed description of substitutions and preferred embodiments
KFRPQRATSCVFAMF

SEQ ID NO: 3071 - protein, 18 aa, Artificial Sequence
  Description of Artificial Sequence: Synthetic peptide
  N-term H or Acetyl
  MOD_RES (14)..(14): Ser or Phospho-Ser
  MOD_RES (16)..(16): Modified Cys
  See specification as filed for detailed description of substitutions and preferred embodiments
KGKKKKKRPQRADSDCFA

SEQ ID NO: 3072 - protein, 18 aa, Artificial Sequence
  Description of Artificial Sequence: Synthetic peptide
  N-term H or Acetyl
  MOD_RES (14)..(14): Ser or Phospho-Ser
  MOD_RES (16)..(16): Modified Cys
  See specification as filed for detailed description of substitutions and preferred embodiments
KGKKKKKRPQRADSDCFS

SEQ ID NO: 3073 - protein, 18 aa, Artificial Sequence
  Description of Artificial Sequence: Synthetic peptide
  N-term H or Acetyl
  MOD_RES (14)..(14): Ser or Phospho-Ser
  MOD_RES (16)..(16): Modified Cys
  See specification as filed for detailed description of substitutions and preferred embodiments
KGKKKKKRPQRADSNCFA

SEQ ID NO: 3074 - protein, 18 aa, Artificial Sequence
  Description of Artificial Sequence: Synthetic peptide
  N-term H or Acetyl
  MOD_RES (14)..(14): Ser or Phospho-Ser
  MOD_RES (16)..(16): Modified Cys
  See specification as filed for detailed description of substitutions and preferred embodiments
KGKKKKKRPQRADSNCFS

SEQ ID NO: 3075 - protein, 18 aa, Artificial Sequence
  Description of Artificial Sequence: Synthetic peptide
  N-term H or Acetyl
  MOD_RES (16)..(16): Modified Cys
  MOD_RES (18)..(18): Ser or Phospho-Ser
  See specification as filed for detailed description of substitutions and preferred embodiments
KGKKKKKRPQRADSDCFS

SEQ ID NO: 3076 - protein, 18 aa, Artificial Sequence
  Description of Artificial Sequence: Synthetic peptide
  N-term H or Acetyl
  MOD_RES (16)..(16): Modified Cys
  MOD_RES (18)..(18): Ser or Phospho-Ser
  See specification as filed for detailed description of substitutions and preferred embodiments
KGKKKKKRPQRADSNCFS

SEQ ID NO: 3077 - protein, 18 aa, Artificial Sequence
  Description of Artificial Sequence: Synthetic peptide
  N-term H or Acetyl
  MOD_RES (14)..(14): Ser or Phospho-Ser
  MOD_RES (16)..(16): Modified Cys
  See specification as filed for detailed description of substitutions and preferred embodiments
KGKKKKKRPQRAESDCFA

SEQ ID NO: 3078 - protein, 18 aa, Artificial Sequence
  Description of Artificial Sequence: Synthetic peptide
  N-term H or Acetyl
  MOD_RES (14)..(14): Ser or Phospho-Ser
  MOD_RES (16)..(16): Modified Cys
  See specification as filed for detailed description of substitutions and preferred embodiments
KGKKKKKRPQRAESDCFS

SEQ ID NO: 3079 - protein, 18 aa, Artificial Sequence
  Description of Artificial Sequence: Synthetic peptide
  N-term H or Acetyl
  MOD_RES (14)..(14): Ser or Phospho-Ser
  MOD_RES (16)..(16): Modified Cys
  See specification as filed for detailed description of substitutions and preferred embodiments
KGKKKKKRPQRAESNCFA

SEQ ID NO: 3080 - protein, 18 aa, Artificial Sequence
  Description of Artificial Sequence: Synthetic peptide
  N-term H or Acetyl
  MOD_RES (14)..(14): Ser or Phospho-Ser
  MOD_RES (16)..(16): Modified Cys
  See specification as filed for detailed description of substitutions and preferred embodiments
KGKKKKKRPQRAESNCFS

SEQ ID NO: 3081 - protein, 18 aa, Artificial Sequence
  Description of Artificial Sequence: Synthetic peptide
  N-term H or Acetyl
  MOD_RES (16)..(16): Modified Cys
  MOD_RES (18)..(18): Ser or Phospho-Ser
  See specification as filed for detailed description of substitutions and preferred embodiments
KGKKKKKRPQRAESDCFS

SEQ ID NO: 3082 - protein, 18 aa, Artificial Sequence
  Description of Artificial Sequence: Synthetic peptide
  N-term H or Acetyl
  MOD_RES (16)..(16): Modified Cys
  MOD_RES (18)..(18): Ser or Phospho-Ser
  See specification as filed for detailed description of substitutions and preferred embodiments
KGKKKKKRPQRAESNCFS

SEQ ID NO: 3083 - protein, 18 aa, Artificial Sequence
  Description of Artificial Sequence: Synthetic peptide
  N-term H or Acetyl
  MOD_RES (14)..(14): Ser or Phospho-Ser
  MOD_RES (16)..(16): Modified Cys
  See specification as filed for detailed description of substitutions and preferred embodiments
KGKKKKKRPQRAHSDCFA

SEQ ID NO: 3084 - protein, 18 aa, Artificial Sequence
  Description of Artificial Sequence: Synthetic peptide
  N-term H or Acetyl
  MOD_RES (14)..(14): Ser or Phospho-Ser
  MOD_RES (16)..(16): Modified Cys
  See specification as filed for detailed description of substitutions and preferred embodiments
KGKKKKKRPQRAHSDCFS

SEQ ID NO: 3085 - protein, 18 aa, Artificial Sequence
  Description of Artificial Sequence: Synthetic peptide
  N-term H or Acetyl
  MOD_RES (14)..(14): Ser or Phospho-Ser
  MOD_RES (16)..(16): Modified Cys
  See specification as filed for detailed description of substitutions and preferred embodiments
KGKKKKKRPQRAHSNCFA

SEQ ID NO: 3086 - protein, 18 aa, Artificial Sequence
  Description of Artificial Sequence: Synthetic peptide
  N-term H or Acetyl
  MOD_RES (14)..(14): Ser or Phospho-Ser
  MOD_RES (16)..(16): Modified Cys
  See specification as filed for detailed description of substitutions and preferred embodiments
KGKKKKKRPQRAHSNCFS

SEQ ID NO: 3087 - protein, 18 aa, Artificial Sequence
  Description of Artificial Sequence: Synthetic peptide
  N-term H or Acetyl
  MOD_RES (16)..(16): Modified Cys
  MOD_RES (18)..(18): Ser or Phospho-Ser
  See specification as filed for detailed description of substitutions and preferred embodiments
KGKKKKKRPQRAHSDCFS

SEQ ID NO: 3088 - protein, 18 aa, Artificial Sequence
  Description of Artificial Sequence: Synthetic peptide
  N-term H or Acetyl
  MOD_RES (16)..(16): Modified Cys
  MOD_RES (18)..(18): Ser or Phospho-Ser
  See specification as filed for detailed description of substitutions and preferred embodiments
KGKKKKKRPQRAHSNCFS

SEQ ID NO: 3089 - protein, 18 aa, Artificial Sequence
  Description of Artificial Sequence: Synthetic peptide
  N-term H or Acetyl
  MOD_RES (14)..(14): Ser or Phospho-Ser
  MOD_RES (16)..(16): Modified Cys
  See specification as filed for detailed description of substitutions and preferred embodiments
KGKKKKKRPQRATSDCFA

SEQ ID NO: 3090 - protein, 18 aa, Artificial Sequence
  Description of Artificial Sequence: Synthetic peptide
  N-term H or Acetyl
  MOD_RES (14)..(14): Ser or Phospho-Ser
  MOD_RES (16)..(16): Modified Cys
  See specification as filed for detailed description of substitutions and preferred embodiments
KGKKKKKRPQRATSDCFS

SEQ ID NO: 3091 - protein, 18 aa, Artificial Sequence
  Description of Artificial Sequence: Synthetic peptide
  N-term H or Acetyl
  MOD_RES (14)..(14): Ser or Phospho-Ser
  MOD_RES (16)..(16): Modified Cys
  See specification as filed for detailed description of substitutions and preferred embodiments
KGKKKKKRPQRATSNCFA

SEQ ID NO: 3092 - protein, 18 aa, Artificial Sequence
  Description of Artificial Sequence: Synthetic peptide
  N-term H or Acetyl
  MOD_RES (14)..(14): Ser or Phospho-Ser
  MOD_RES (16)..(16): Modified Cys
  See specification as filed for detailed description of substitutions and preferred embodiments
KGKKKKKRPQRATSNCFS

SEQ ID NO: 3093 - protein, 18 aa, Artificial Sequence
  Description of Artificial Sequence: Synthetic peptide
  N-term H or Acetyl
  MOD_RES (16)..(16): Modified Cys
  MOD_RES (18)..(18): Ser or Phospho-Ser
  See specification as filed for detailed description of substitutions and preferred embodiments
KGKKKKKRPQRATSDCFS

SEQ ID NO: 3094 - protein, 18 aa, Artificial Sequence
  Description of Artificial Sequence: Synthetic peptide
  N-term H or Acetyl
  MOD_RES (16)..(16): Modified Cys
  MOD_RES (18)..(18): Ser or Phospho-Ser
  See specification as filed for detailed description of substitutions and preferred embodiments
KGKKKKKRPQRATSNCFS

SEQ ID NO: 3095 - protein, 18 aa, Artificial Sequence
  Description of Artificial Sequence: Synthetic peptide
  N-term H or Acetyl
  MOD_RES (14)..(14): Ser or Phospho-Ser
  MOD_RES (16)..(16): Modified Cys
  See specification as filed for detailed description of substitutions and preferred embodiments
KGKKRKKRPQRADSDCFA

SEQ ID NO: 3096 - protein, 18 aa, Artificial Sequence
  Description of Artificial Sequence: Synthetic peptide
  N-term H or Acetyl
  MOD_RES (14)..(14): Ser or Phospho-Ser
  MOD_RES (16)..(16): Modified Cys
  See specification as filed for detailed description of substitutions and preferred embodiments
KGKKRKKRPQRADSDCFS

SEQ ID NO: 3097 - protein, 18 aa, Artificial Sequence
  Description of Artificial Sequence: Synthetic peptide
  N-term H or Acetyl
  MOD_RES (14)..(14): Ser or Phospho-Ser
  MOD_RES (16)..(16): Modified Cys
  See specification as filed for detailed description of substitutions and preferred embodiments
KGKKRKKRPQRADSNCFA

SEQ ID NO: 3098 - protein, 18 aa, Artificial Sequence
  Description of Artificial Sequence: Synthetic peptide
  N-term H or Acetyl
  MOD_RES (14)..(14): Ser or Phospho-Ser
  MOD_RES (16)..(16): Modified Cys
  See specification as filed for detailed description of substitutions and preferred embodiments
KGKKRKKRPQRADSNCFS

SEQ ID NO: 3099 - protein, 18 aa, Artificial Sequence
  Description of Artificial Sequence: Synthetic peptide
  N-term H or Acetyl
  MOD_RES (16)..(16): Modified Cys
  MOD_RES (18)..(18): Ser or Phospho-Ser
  See specification as filed for detailed description of substitutions and preferred embodiments
KGKKRKKRPQRADSDCFS

SEQ ID NO: 3100 - protein, 18 aa, Artificial Sequence
  Description of Artificial Sequence: Synthetic peptide
  N-term H or Acetyl
  MOD_RES (16)..(16): Modified Cys
  MOD_RES (18)..(18): Ser or Phospho-Ser
  See specification as filed for detailed description of substitutions and preferred embodiments
KGKKRKKRPQRADSNCFS

SEQ ID NO: 3101 - protein, 18 aa, Artificial Sequence
  Description of Artificial Sequence: Synthetic peptide
  N-term H or Acetyl
  MOD_RES (14)..(14): Ser or Phospho-Ser
  MOD_RES (16)..(16): Modified Cys
  See specification as filed for detailed description of substitutions and preferred embodiments
KGKKRKKRPQRAESDCFA

SEQ ID NO: 3102 - protein, 18 aa, Artificial Sequence
  Description of Artificial Sequence: Synthetic peptide
  N-term H or Acetyl
  MOD_RES (14)..(14): Ser or Phospho-Ser
  MOD_RES (16)..(16): Modified Cys
  See specification as filed for detailed description of substitutions and preferred embodiments
KGKKRKKRPQRAESDCFS

SEQ ID NO: 3103 - protein, 18 aa, Artificial Sequence
  Description of Artificial Sequence: Synthetic peptide
  N-term H or Acetyl
  MOD_RES (14)..(14): Ser or Phospho-Ser
  MOD_RES (16)..(16): Modified Cys
  See specification as filed for detailed description of substitutions and preferred embodiments
KGKKRKKRPQRAESNCFA

SEQ ID NO: 3104 - protein, 18 aa, Artificial Sequence
  Description of Artificial Sequence: Synthetic peptide
  N-term H or Acetyl
  MOD_RES (14)..(14): Ser or Phospho-Ser
  MOD_RES (16)..(16): Modified Cys
  See specification as filed for detailed description of substitutions and preferred embodiments
KGKKRKKRPQRAESNCFS

SEQ ID NO: 3105 - protein, 18 aa, Artificial Sequence
  Description of Artificial Sequence: Synthetic peptide
  N-term H or Acetyl
  MOD_RES (16)..(16): Modified Cys
  MOD_RES (18)..(18): Ser or Phospho-Ser
  See specification as filed for detailed description of substitutions and preferred embodiments
KGKKRKKRPQRAESDCFS

SEQ ID NO: 3106 - protein, 18 aa, Artificial Sequence
  Description of Artificial Sequence: Synthetic peptide
  N-term H or Acetyl
  MOD_RES (16)..(16): Modified Cys
  MOD_RES (18)..(18): Ser or Phospho-Ser
  See specification as filed for detailed description of substitutions and preferred embodiments
KGKKRKKRPQRAESNCFS

SEQ ID NO: 3107 - protein, 18 aa, Artificial Sequence
  Description of Artificial Sequence: Synthetic peptide
  N-term H or Acetyl
  MOD_RES (14)..(14): Ser or Phospho-Ser
  MOD_RES (16)..(16): Modified Cys
  See specification as filed for detailed description of substitutions and preferred embodiments
KGKKRKKRPQRAHSDCFA

SEQ ID NO: 3108 - protein, 18 aa, Artificial Sequence
  Description of Artificial Sequence: Synthetic peptide
  N-term H or Acetyl
  MOD_RES (14)..(14): Ser or Phospho-Ser
  MOD_RES (16)..(16): Modified Cys
  See specification as filed for detailed description of substitutions and preferred embodiments
KGKKRKKRPQRAHSDCFS

SEQ ID NO: 3109 - protein, 18 aa, Artificial Sequence
  Description of Artificial Sequence: Synthetic peptide
  N-term H or Acetyl
  MOD_RES (14)..(14): Ser or Phospho-Ser
  MOD_RES (16)..(16): Modified Cys
  See specification as filed for detailed description of substitutions and preferred embodiments
KGKKRKKRPQRAHSNCFA

SEQ ID NO: 3110 - protein, 18 aa, Artificial Sequence
  Description of Artificial Sequence: Synthetic peptide
  N-term H or Acetyl
  MOD_RES (14)..(14): Ser or Phospho-Ser
  MOD_RES (16)..(16): Modified Cys
  See specification as filed for detailed description of substitutions and preferred embodiments
KGKKRKKRPQRAHSNCFS

SEQ ID NO: 3111 - protein, 18 aa, Artificial Sequence
  Description of Artificial Sequence: Synthetic peptide
  N-term H or Acetyl
  MOD_RES (16)..(16): Modified Cys
  MOD_RES (18)..(18): Ser or Phospho-Ser
  See specification as filed for detailed description of substitutions and preferred embodiments
KGKKRKKRPQRAHSDCFS

SEQ ID NO: 3112 - protein, 18 aa, Artificial Sequence
  Description of Artificial Sequence: Synthetic peptide
  N-term H or Acetyl
  MOD_RES (16)..(16): Modified Cys
  MOD_RES (18)..(18): Ser or Phospho-Ser
  See specification as filed for detailed description of substitutions and preferred embodiments
KGKKRKKRPQRAHSNCFS

SEQ ID NO: 3113 - protein, 18 aa, Artificial Sequence
  Description of Artificial Sequence: Synthetic peptide
  N-term H or Acetyl
  MOD_RES (14)..(14): Ser or Phospho-Ser
  MOD_RES (16)..(16): Modified Cys
  See specification as filed for detailed description of substitutions and preferred embodiments
KGKKRKKRPQRATSDCFA

SEQ ID NO: 3114 - protein, 18 aa, Artificial Sequence
  Description of Artificial Sequence: Synthetic peptide
  N-term H or Acetyl
  MOD_RES (14)..(14): Ser or Phospho-Ser
  MOD_RES (16)..(16): Modified Cys
  See specification as filed for detailed description of substitutions and preferred embodiments
KGKKRKKRPQRATSDCFS

SEQ ID NO: 3115 - protein, 18 aa, Artificial Sequence
  Description of Artificial Sequence: Synthetic peptide
  N-term H or Acetyl
  MOD_RES (14)..(14): Ser or Phospho-Ser
  MOD_RES (16)..(16): Modified Cys
  See specification as filed for detailed description of substitutions and preferred embodiments
KGKKRKKRPQRATSNCFA

SEQ ID NO: 3116 - protein, 18 aa, Artificial Sequence
  Description of Artificial Sequence: Synthetic peptide
  N-term H or Acetyl
  MOD_RES (14)..(14): Ser or Phospho-Ser
  MOD_RES (16)..(16): Modified Cys
  See specification as filed for detailed description of substitutions and preferred embodiments
KGKKRKKRPQRATSNCFS

SEQ ID NO: 3117 - protein, 18 aa, Artificial Sequence
  Description of Artificial Sequence: Synthetic peptide
  N-term H or Acetyl
  MOD_RES (16)..(16): Modified Cys
  MOD_RES (18)..(18): Ser or Phospho-Ser
  See specification as filed for detailed description of substitutions and preferred embodiments
KGKKRKKRPQRATSDCFS

SEQ ID NO: 3118 - protein, 18 aa, Artificial Sequence
  Description of Artificial Sequence: Synthetic peptide
  N-term H or Acetyl
  MOD_RES (16)..(16): Modified Cys
  MOD_RES (18)..(18): Ser or Phospho-Ser
  See specification as filed for detailed description of substitutions and preferred embodiments
KGKKRKKRPQRATSNCFS

SEQ ID NO: 3119 - protein, 18 aa, Artificial Sequence
  Description of Artificial Sequence: Synthetic peptide
  N-term H or Acetyl
  MOD_RES (14)..(14): Ser or Phospho-Ser
  MOD_RES (16)..(16): Modified Cys
  See specification as filed for detailed description of substitutions and preferred embodiments
KGKKTKKRPQRADSDCFA

SEQ ID NO: 3120 - protein, 18 aa, Artificial Sequence
  Description of Artificial Sequence: Synthetic peptide
  N-term H or Acetyl
  MOD_RES (14)..(14): Ser or Phospho-Ser
  MOD_RES (16)..(16): Modified Cys
  See specification as filed for detailed description of substitutions and preferred embodiments
KGKKTKKRPQRADSDCFS

SEQ ID NO: 3121 - protein, 18 aa, Artificial Sequence
  Description of Artificial Sequence: Synthetic peptide
  N-term H or Acetyl
  MOD_RES (14)..(14): Ser or Phospho-Ser
  MOD_RES (16)..(16): Modified Cys
  See specification as filed for detailed description of substitutions and preferred embodiments
KGKKTKKRPQRADSNCFA

SEQ ID NO: 3122 - protein, 18 aa, Artificial Sequence
  Description of Artificial Sequence: Synthetic peptide
  N-term H or Acetyl
  MOD_RES (14)..(14): Ser or Phospho-Ser
  MOD_RES (16)..(16): Modified Cys
  See specification as filed for detailed description of substitutions and preferred embodiments
KGKKTKKRPQRADSNCFS

SEQ ID NO: 3123 - protein, 18 aa, Artificial Sequence
  Description of Artificial Sequence: Synthetic peptide
  N-term H or Acetyl
  MOD_RES (16)..(16): Modified Cys
  MOD_RES (18)..(18): Ser or Phospho-Ser
  See specification as filed for detailed description of substitutions and preferred embodiments
KGKKTKKRPQRADSDCFS

SEQ ID NO: 3124 - protein, 18 aa, Artificial Sequence
  Description of Artificial Sequence: Synthetic peptide
  N-term H or Acetyl
  MOD_RES (16)..(16): Modified Cys
  MOD_RES (18)..(18): Ser or Phospho-Ser
  See specification as filed for detailed description of substitutions and preferred embodiments
KGKKTKKRPQRADSNCFS

SEQ ID NO: 3125 - protein, 18 aa, Artificial Sequence
  Description of Artificial Sequence: Synthetic peptide
  N-term H or Acetyl
  MOD_RES (14)..(14): Ser or Phospho-Ser
  MOD_RES (16)..(16): Modified Cys
  See specification as filed for detailed description of substitutions and preferred embodiments
KGKKTKKRPQRAESDCFA

SEQ ID NO: 3126 - protein, 18 aa, Artificial Sequence
  Description of Artificial Sequence: Synthetic peptide
  N-term H or Acetyl
  MOD_RES (14)..(14): Ser or Phospho-Ser
  MOD_RES (16)..(16): Modified Cys
  See specification as filed for detailed description of substitutions and preferred embodiments
KGKKTKKRPQRAESDCFS

SEQ ID NO: 3127 - protein, 18 aa, Artificial Sequence
  Description of Artificial Sequence: Synthetic peptide
  N-term H or Acetyl
  MOD_RES (14)..(14): Ser or Phospho-Ser
  MOD_RES (16)..(16): Modified Cys
  See specification as filed for detailed description of substitutions and preferred embodiments
KGKKTKKRPQRAESNCFA

SEQ ID NO: 3128 - protein, 18 aa, Artificial Sequence
  Description of Artificial Sequence: Synthetic peptide
  N-term H or Acetyl
  MOD_RES (14)..(14): Ser or Phospho-Ser
  MOD_RES (16)..(16): Modified Cys
  See specification as filed for detailed description of substitutions and preferred embodiments
KGKKTKKRPQRAESNCFS

SEQ ID NO: 3129 - protein, 18 aa, Artificial Sequence
  Description of Artificial Sequence: Synthetic peptide
  N-term H or Acetyl
  MOD_RES (16)..(16): Modified Cys
  MOD_RES (18)..(18): Ser or Phospho-Ser
  See specification as filed for detailed description of substitutions and preferred embodiments
KGKKTKKRPQRAESDCFS

SEQ ID NO: 3130 - protein, 18 aa, Artificial Sequence
  Description of Artificial Sequence: Synthetic peptide
  N-term H or Acetyl
  MOD_RES (16)..(16): Modified Cys
  MOD_RES (18)..(18): Ser or Phospho-Ser
  See specification as filed for detailed description of substitutions and preferred embodiments
KGKKTKKRPQRAESNCFS

SEQ ID NO: 3131 - protein, 18 aa, Artificial Sequence
  Description of Artificial Sequence: Synthetic peptide
  N-term H or Acetyl
  MOD_RES (14)..(14): Ser or Phospho-Ser
  MOD_RES (16)..(16): Modified Cys
  See specification as filed for detailed description of substitutions and preferred embodiments
KGKKTKKRPQRAHSDCFA

SEQ ID NO: 3132 - protein, 18 aa, Artificial Sequence
  Description of Artificial Sequence: Synthetic peptide
  N-term H or Acetyl
  MOD_RES (14)..(14): Ser or Phospho-Ser
  MOD_RES (16)..(16): Modified Cys
  See specification as filed for detailed description of substitutions and preferred embodiments
KGKKTKKRPQRAHSDCFS

SEQ ID NO: 3133 - protein, 18 aa, Artificial Sequence
  Description of Artificial Sequence: Synthetic peptide
  N-term H or Acetyl
  MOD_RES (14)..(14): Ser or Phospho-Ser
  MOD_RES (16)..(16): Modified Cys
  See specification as filed for detailed description of substitutions and preferred embodiments
KGKKTKKRPQRAHSNCFA

SEQ ID NO: 3134 - protein, 18 aa, Artificial Sequence
  Description of Artificial Sequence: Synthetic peptide
  N-term H or Acetyl
  MOD_RES (14)..(14): Ser or Phospho-Ser
  MOD_RES (16)..(16): Modified Cys
  See specification as filed for detailed description of substitutions and preferred embodiments
KGKKTKKRPQRAHSNCFS

SEQ ID NO: 3135 - protein, 18 aa, Artificial Sequence
  Description of Artificial Sequence: Synthetic peptide
  N-term H or Acetyl
  MOD_RES (16)..(16): Modified Cys
  MOD_RES (18)..(18): Ser or Phospho-Ser
  See specification as filed for detailed description of substitutions and preferred embodiments
KGKKTKKRPQRAHSDCFS

SEQ ID NO: 3136 - protein, 18 aa, Artificial Sequence
  Description of Artificial Sequence: Synthetic peptide
  N-term H or Acetyl
  MOD_RES (16)..(16): Modified Cys
  MOD_RES (18)..(18): Ser or Phospho-Ser
  See specification as filed for detailed description of substitutions and preferred embodiments
KGKKTKKRPQRAHSNCFS

SEQ ID NO: 3137 - protein, 18 aa, Artificial Sequence
  Description of Artificial Sequence: Synthetic peptide
  N-term H or Acetyl
  MOD_RES (14)..(14): Ser or Phospho-Ser
  MOD_RES (16)..(16): Modified Cys
  See specification as filed for detailed description of substitutions and preferred embodiments
KGKKTKKRPQRATSDCFA

SEQ ID NO: 3138 - protein, 18 aa, Artificial Sequence
  Description of Artificial Sequence: Synthetic peptide
  N-term H or Acetyl
  MOD_RES (14)..(14): Ser or Phospho-Ser
  MOD_RES (16)..(16): Modified Cys
  See specification as filed for detailed description of substitutions and preferred embodiments
KGKKTKKRPQRATSDCFS

SEQ ID NO: 3139 - protein, 18 aa, Artificial Sequence
  Description of Artificial Sequence: Synthetic peptide
  N-term H or Acetyl
  MOD_RES (14)..(14): Ser or Phospho-Ser
  MOD_RES (16)..(16): Modified Cys
  See specification as filed for detailed description of substitutions and preferred embodiments
KGKKTKKRPQRATSNCFA

SEQ ID NO: 3140 - protein, 18 aa, Artificial Sequence
  Description of Artificial Sequence: Synthetic peptide
  N-term H or Acetyl
  MOD_RES (14)..(14): Ser or Phospho-Ser
  MOD_RES (16)..(16): Modified Cys
  See specification as filed for detailed description of substitutions and preferred embodiments
KGKKTKKRPQRATSNCFS

SEQ ID NO: 3141 - protein, 18 aa, Artificial Sequence
  Description of Artificial Sequence: Synthetic peptide
  N-term H or Acetyl
  MOD_RES (16)..(16): Modified Cys
  MOD_RES (18)..(18): Ser or Phospho-Ser
  See specification as filed for detailed description of substitutions and preferred embodiments
KGKKTKKRPQRATSDCFS

SEQ ID NO: 3142 - protein, 18 aa, Artificial Sequence
  Description of Artificial Sequence: Synthetic peptide
  N-term H or Acetyl
  MOD_RES (16)..(16): Modified Cys
  MOD_RES (18)..(18): Ser or Phospho-Ser
  See specification as filed for detailed description of substitutions and preferred embodiments
KGKKTKKRPQRATSNCFS

SEQ ID NO: 3143 - protein, 18 aa, Artificial Sequence
  Description of Artificial Sequence: Synthetic peptide
  N-term H or Acetyl
  MOD_RES (14)..(14): Ser or Phospho-Ser
  MOD_RES (16)..(16): Modified Cys
  See specification as filed for detailed description of substitutions and preferred embodiments
KGKKVKKRPQRADSDCFA

SEQ ID NO: 3144 - protein, 18 aa, Artificial Sequence
  Description of Artificial Sequence: Synthetic peptide
  N-term H or Acetyl
  MOD_RES (14)..(14): Ser or Phospho-Ser
  MOD_RES (16)..(16): Modified Cys
  See specification as filed for detailed description of substitutions and preferred embodiments
KGKKVKKRPQRADSDCFS

SEQ ID NO: 3145 - protein, 18 aa, Artificial Sequence
  Description of Artificial Sequence: Synthetic peptide
  N-term H or Acetyl
  MOD_RES (14)..(14): Ser or Phospho-Ser
  MOD_RES (16)..(16): Modified Cys
  See specification as filed for detailed description of substitutions and preferred embodiments
KGKKVKKRPQRADSNCFA

SEQ ID NO: 3146 - protein, 18 aa, Artificial Sequence
  Description of Artificial Sequence: Synthetic peptide
  N-term H or Acetyl
  MOD_RES (14)..(14): Ser or Phospho-Ser
  MOD_RES (16)..(16): Modified Cys
  See specification as filed for detailed description of substitutions and preferred embodiments
KGKKVKKRPQRADSNCFS

SEQ ID NO: 3147 - protein, 18 aa, Artificial Sequence
  Description of Artificial Sequence: Synthetic peptide
  N-term H or Acetyl
  MOD_RES (16)..(16): Modified Cys
  MOD_RES (18)..(18): Ser or Phospho-Ser
  See specification as filed for detailed description of substitutions and preferred embodiments
KGKKVKKRPQRADSDCFS

SEQ ID NO: 3148 - protein, 18 aa, Artificial Sequence
  Description of Artificial Sequence: Synthetic peptide
  N-term H or Acetyl
  MOD_RES (16)..(16): Modified Cys
  MOD_RES (18)..(18): Ser or Phospho-Ser
  See specification as filed for detailed description of substitutions and preferred embodiments
KGKKVKKRPQRADSNCFS

SEQ ID NO: 3149 - protein, 18 aa, Artificial Sequence
  Description of Artificial Sequence: Synthetic peptide
  N-term H or Acetyl
  MOD_RES (14)..(14): Ser or Phospho-Ser
  MOD_RES (16)..(16): Modified Cys
  See specification as filed for detailed description of substitutions and preferred embodiments
KGKKVKKRPQRAESDCFA

SEQ ID NO: 3150 - protein, 18 aa, Artificial Sequence
  Description of Artificial Sequence: Synthetic peptide
  N-term H or Acetyl
  MOD_RES (14)..(14): Ser or Phospho-Ser
  MOD_RES (16)..(16): Modified Cys
  See specification as filed for detailed description of substitutions and preferred embodiments
KGKKVKKRPQRAESDCFS

SEQ ID NO: 3151 - protein, 18 aa, Artificial Sequence
  Description of Artificial Sequence: Synthetic peptide
  N-term H or Acetyl
  MOD_RES (14)..(14): Ser or Phospho-Ser
  MOD_RES (16)..(16): Modified Cys
  See specification as filed for detailed description of substitutions and preferred embodiments
KGKKVKKRPQRAESNCFA

SEQ ID NO: 3152 - protein, 18 aa, Artificial Sequence
  Description of Artificial Sequence: Synthetic peptide
  N-term H or Acetyl
  MOD_RES (14)..(14): Ser or Phospho-Ser
  MOD_RES (16)..(16): Modified Cys
  See specification as filed for detailed description of substitutions and preferred embodiments
KGKKVKKRPQRAESNCFS

SEQ ID NO: 3153 - protein, 18 aa, Artificial Sequence
  Description of Artificial Sequence: Synthetic peptide
  N-term H or Acetyl
  MOD_RES (16)..(16): Modified Cys
  MOD_RES (18)..(18): Ser or Phospho-Ser
  See specification as filed for detailed description of substitutions and preferred embodiments
KGKKVKKRPQRAESDCFS

SEQ ID NO: 3154 - protein, 18 aa, Artificial Sequence
  Description of Artificial Sequence: Synthetic peptide
  N-term H or Acetyl
  MOD_RES (16)..(16): Modified Cys
  MOD_RES (18)..(18): Ser or Phospho-Ser
  See specification as filed for detailed description of substitutions and preferred embodiments
KGKKVKKRPQRAESNCFS

SEQ ID NO: 3155 - protein, 18 aa, Artificial Sequence
  Description of Artificial Sequence: Synthetic peptide
  N-term H or Acetyl
  MOD_RES (14)..(14): Ser or Phospho-Ser
  MOD_RES (16)..(16): Modified Cys
  See specification as filed for detailed description of substitutions and preferred embodiments
KGKKVKKRPQRAHSDCFA

SEQ ID NO: 3156 - protein, 18 aa, Artificial Sequence
  Description of Artificial Sequence: Synthetic peptide
  N-term H or Acetyl
  MOD_RES (14)..(14): Ser or Phospho-Ser
  MOD_RES (16)..(16): Modified Cys
  See specification as filed for detailed description of substitutions and preferred embodiments
KGKKVKKRPQRAHSDCFS

SEQ ID NO: 3157 - protein, 18 aa, Artificial Sequence
  Description of Artificial Sequence: Synthetic peptide
  N-term H or Acetyl
  MOD_RES (14)..(14): Ser or Phospho-Ser
  MOD_RES (16)..(16): Modified Cys
  See specification as filed for detailed description of substitutions and preferred embodiments
KGKKVKKRPQRAHSNCFA

SEQ ID NO: 3158 - protein, 18 aa, Artificial Sequence
  Description of Artificial Sequence: Synthetic peptide
  N-term H or Acetyl
  MOD_RES (14)..(14): Ser or Phospho-Ser
  MOD_RES (16)..(16): Modified Cys
  See specification as filed for detailed description of substitutions and preferred embodiments
KGKKVKKRPQRAHSNCFS

SEQ ID NO: 3159 - protein, 18 aa, Artificial Sequence
  Description of Artificial Sequence: Synthetic peptide
  N-term H or Acetyl
  MOD_RES (16)..(16): Modified Cys
  MOD_RES (18)..(18): Ser or Phospho-Ser
  See specification as filed for detailed description of substitutions and preferred embodiments
KGKKVKKRPQRAHSDCFS

SEQ ID NO: 3160 - protein, 18 aa, Artificial Sequence
  Description of Artificial Sequence: Synthetic peptide
  N-term H or Acetyl
  MOD_RES (16)..(16): Modified Cys
  MOD_RES (18)..(18): Ser or Phospho-Ser
  See specification as filed for detailed description of substitutions and preferred embodiments
KGKKVKKRPQRAHSNCFS

SEQ ID NO: 3161 - protein, 18 aa, Artificial Sequence
  Description of Artificial Sequence: Synthetic peptide
  N-term H or Acetyl
  MOD_RES (14)..(14): Ser or Phospho-Ser
  MOD_RES (16)..(16): Modified Cys
  See specification as filed for detailed description of substitutions and preferred embodiments
KGKKVKKRPQRATSDCFA

SEQ ID NO: 3162 - protein, 18 aa, Artificial Sequence
  Description of Artificial Sequence: Synthetic peptide
  N-term H or Acetyl
  MOD_RES (14)..(14): Ser or Phospho-Ser
  MOD_RES (16)..(16): Modified Cys
  See specification as filed for detailed description of substitutions and preferred embodiments
KGKKVKKRPQRATSDCFS

SEQ ID NO: 3163 - protein, 18 aa, Artificial Sequence
  Description of Artificial Sequence: Synthetic peptide
  N-term H or Acetyl
  MOD_RES (14)..(14): Ser or Phospho-Ser
  MOD_RES (16)..(16): Modified Cys
  See specification as filed for detailed description of substitutions and preferred embodiments
KGKKVKKRPQRATSNCFA

SEQ ID NO: 3164 - protein, 18 aa, Artificial Sequence
  Description of Artificial Sequence: Synthetic peptide
  N-term H or Acetyl
  MOD_RES (14)..(14): Ser or Phospho-Ser
  MOD_RES (16)..(16): Modified Cys
  See specification as filed for detailed description of substitutions and preferred embodiments
KGKKVKKRPQRATSNCFS

SEQ ID NO: 3165 - protein, 18 aa, Artificial Sequence
  Description of Artificial Sequence: Synthetic peptide
  N-term H or Acetyl
  MOD_RES (16)..(16): Modified Cys
  MOD_RES (18)..(18): Ser or Phospho-Ser
  See specification as filed for detailed description of substitutions and preferred embodiments
KGKKVKKRPQRATSDCFS

SEQ ID NO: 3166 - protein, 18 aa, Artificial Sequence
  Description of Artificial Sequence: Synthetic peptide
  N-term H or Acetyl
  MOD_RES (16)..(16): Modified Cys
  MOD_RES (18)..(18): Ser or Phospho-Ser
  See specification as filed for detailed description of substitutions and preferred embodiments
KGKKVKKRPQRATSNCFS

SEQ ID NO: 3167 - protein, 18 aa, Artificial Sequence
  Description of Artificial Sequence: Synthetic peptide
  N-term H or Acetyl
  MOD_RES (14)..(14): Ser or Phospho-Ser
  MOD_RES (16)..(16): Modified Cys
  See specification as filed for detailed description of substitutions and preferred embodiments
KGKTKKKRPQRADSDCFA

SEQ ID NO: 3168 - protein, 18 aa, Artificial Sequence
  Description of Artificial Sequence: Synthetic peptide
  N-term H or Acetyl
  MOD_RES (14)..(14): Ser or Phospho-Ser
  MOD_RES (16)..(16): Modified Cys
  See specification as filed for detailed description of substitutions and preferred embodiments
KGKTKKKRPQRADSDCFS

SEQ ID NO: 3169 - protein, 18 aa, Artificial Sequence
  Description of Artificial Sequence: Synthetic peptide
  N-term H or Acetyl
  MOD_RES (14)..(14): Ser or Phospho-Ser
  MOD_RES (16)..(16): Modified Cys
  See specification as filed for detailed description of substitutions and preferred embodiments
KGKTKKKRPQRADSNCFA

SEQ ID NO: 3170 - protein, 18 aa, Artificial Sequence
  Description of Artificial Sequence: Synthetic peptide
  N-term H or Acetyl
  MOD_RES (14)..(14): Ser or Phospho-Ser
  MOD_RES (16)..(16): Modified Cys
  See specification as filed for detailed description of substitutions and preferred embodiments
KGKTKKKRPQRADSNCFS

SEQ ID NO: 3171 - protein, 18 aa, Artificial Sequence
  Description of Artificial Sequence: Synthetic peptide
  N-term H or Acetyl
  MOD_RES (16)..(16): Modified Cys
  MOD_RES (18)..(18): Ser or Phospho-Ser
  See specification as filed for detailed description of substitutions and preferred embodiments
KGKTKKKRPQRADSDCFS

SEQ ID NO: 3172 - protein, 18 aa, Artificial Sequence
  Description of Artificial Sequence: Synthetic peptide
  N-term H or Acetyl
  MOD_RES (16)..(16): Modified Cys
  MOD_RES (18)..(18): Ser or Phospho-Ser
  See specification as filed for detailed description of substitutions and preferred embodiments
KGKTKKKRPQRADSNCFS

SEQ ID NO: 3173 - protein, 18 aa, Artificial Sequence
  Description of Artificial Sequence: Synthetic peptide
  N-term H or Acetyl
  MOD_RES (14)..(14): Ser or Phospho-Ser
  MOD_RES (16)..(16): Modified Cys
  See specification as filed for detailed description of substitutions and preferred embodiments
KGKTKKKRPQRAESDCFA

SEQ ID NO: 3174 - protein, 18 aa, Artificial Sequence
  Description of Artificial Sequence: Synthetic peptide
  N-term H or Acetyl
  MOD_RES (14)..(14): Ser or Phospho-Ser
  MOD_RES (16)..(16): Modified Cys
  See specification as filed for detailed description of substitutions and preferred embodiments
KGKTKKKRPQRAESDCFS

SEQ ID NO: 3175 - protein, 18 aa, Artificial Sequence
  Description of Artificial Sequence: Synthetic peptide
  N-term H or Acetyl
  MOD_RES (14)..(14): Ser or Phospho-Ser
  MOD_RES (16)..(16): Modified Cys
  See specification as filed for detailed description of substitutions and preferred embodiments
KGKTKKKRPQRAESNCFA

SEQ ID NO: 3176 - protein, 18 aa, Artificial Sequence
  Description of Artificial Sequence: Synthetic peptide
  N-term H or Acetyl
  MOD_RES (14)..(14): Ser or Phospho-Ser
  MOD_RES (16)..(16): Modified Cys
  See specification as filed for detailed description of substitutions and preferred embodiments
KGKTKKKRPQRAESNCFS

SEQ ID NO: 3177 - protein, 18 aa, Artificial Sequence
  Description of Artificial Sequence: Synthetic peptide
  N-term H or Acetyl
  MOD_RES (16)..(16): Modified Cys
  MOD_RES (18)..(18): Ser or Phospho-Ser
  See specification as filed for detailed description of substitutions and preferred embodiments
KGKTKKKRPQRAESDCFS

SEQ ID NO: 3178 - protein, 18 aa, Artificial Sequence
  Description of Artificial Sequence: Synthetic peptide
  N-term H or Acetyl
  MOD_RES (16)..(16): Modified Cys
  MOD_RES (18)..(18): Ser or Phospho-Ser
  See specification as filed for detailed description of substitutions and preferred embodiments
KGKTKKKRPQRAESNCFS

SEQ ID NO: 3179 - protein, 18 aa, Artificial Sequence
  Description of Artificial Sequence: Synthetic peptide
  N-term H or Acetyl
  MOD_RES (14)..(14): Ser or Phospho-Ser
  MOD_RES (16)..(16): Modified Cys
  See specification as filed for detailed description of substitutions and preferred embodiments
KGKTKKKRPQRAHSDCFA

SEQ ID NO: 3180 - protein, 18 aa, Artificial Sequence
  Description of Artificial Sequence: Synthetic peptide
  N-term H or Acetyl
  MOD_RES (14)..(14): Ser or Phospho-Ser
  MOD_RES (16)..(16): Modified Cys
  See specification as filed for detailed description of substitutions and preferred embodiments
KGKTKKKRPQRAHSDCFS

SEQ ID NO: 3181 - protein, 18 aa, Artificial Sequence
  Description of Artificial Sequence: Synthetic peptide
  N-term H or Acetyl
  MOD_RES (14)..(14): Ser or Phospho-Ser
  MOD_RES (16)..(16): Modified Cys
  See specification as filed for detailed description of substitutions and preferred embodiments
KGKTKKKRPQRAHSNCFA

SEQ ID NO: 3182 - protein, 18 aa, Artificial Sequence
  Description of Artificial Sequence: Synthetic peptide
  N-term H or Acetyl
  MOD_RES (14)..(14): Ser or Phospho-Ser
  MOD_RES (16)..(16): Modified Cys
  See specification as filed for detailed description of substitutions and preferred embodiments
KGKTKKKRPQRAHSNCFS

SEQ ID NO: 3183 - protein, 18 aa, Artificial Sequence
  Description of Artificial Sequence: Synthetic peptide
  N-term H or Acetyl
  MOD_RES (16)..(16): Modified Cys
  MOD_RES (18)..(18): Ser or Phospho-Ser
  See specification as filed for detailed description of substitutions and preferred embodiments
KGKTKKKRPQRAHSDCFS

SEQ ID NO: 3184 - protein, 18 aa, Artificial Sequence
  Description of Artificial Sequence: Synthetic peptide
  N-term H or Acetyl
  MOD_RES (16)..(16): Modified Cys
  MOD_RES (18)..(18): Ser or Phospho-Ser
  See specification as filed for detailed description of substitutions and preferred embodiments
KGKTKKKRPQRAHSNCFS

SEQ ID NO: 3185 - protein, 18 aa, Artificial Sequence
  Description of Artificial Sequence: Synthetic peptide
  N-term H or Acetyl
  MOD_RES (14)..(14): Ser or Phospho-Ser
  MOD_RES (16)..(16): Modified Cys
  See specification as filed for detailed description of substitutions and preferred embodiments
KGKTKKKRPQRATSDCFA

SEQ ID NO: 3186 - protein, 18 aa, Artificial Sequence
  Description of Artificial Sequence: Synthetic peptide
  N-term H or Acetyl
  MOD_RES (14)..(14): Ser or Phospho-Ser
  MOD_RES (16)..(16): Modified Cys
  See specification as filed for detailed description of substitutions and preferred embodiments
KGKTKKKRPQRATSDCFS

SEQ ID NO: 3187 - protein, 18 aa, Artificial Sequence
  Description of Artificial Sequence: Synthetic peptide
  N-term H or Acetyl
  MOD_RES (14)..(14): Ser or Phospho-Ser
  MOD_RES (16)..(16): Modified Cys
  See specification as filed for detailed description of substitutions and preferred embodiments
KGKTKKKRPQRATSNCFA

SEQ ID NO: 3188 - protein, 18 aa, Artificial Sequence
  Description of Artificial Sequence: Synthetic peptide
  N-term H or Acetyl
  MOD_RES (14)..(14): Ser or Phospho-Ser
  MOD_RES (16)..(16): Modified Cys
  See specification as filed for detailed description of substitutions and preferred embodiments
KGKTKKKRPQRATSNCFS

SEQ ID NO: 3189 - protein, 18 aa, Artificial Sequence
  Description of Artificial Sequence: Synthetic peptide
  N-term H or Acetyl
  MOD_RES (16)..(16): Modified Cys
  MOD_RES (18)..(18): Ser or Phospho-Ser
  See specification as filed for detailed description of substitutions and preferred embodiments
KGKTKKKRPQRATSDCFS

SEQ ID NO: 3190 - protein, 18 aa, Artificial Sequence
  Description of Artificial Sequence: Synthetic peptide
  N-term H or Acetyl
  MOD_RES (16)..(16): Modified Cys
  MOD_RES (18)..(18): Ser or Phospho-Ser
  See specification as filed for detailed description of substitutions and preferred embodiments
KGKTKKKRPQRATSNCFS

SEQ ID NO: 3191 - protein, 18 aa, Artificial Sequence
  Description of Artificial Sequence: Synthetic peptide
  N-term H or Acetyl
  MOD_RES (14)..(14): Ser or Phospho-Ser
  MOD_RES (16)..(16): Modified Cys
  See specification as filed for detailed description of substitutions and preferred embodiments
KGKTRKKRPQRADSDCFA

SEQ ID NO: 3192 - protein, 18 aa, Artificial Sequence
  Description of Artificial Sequence: Synthetic peptide
  N-term H or Acetyl
  MOD_RES (14)..(14): Ser or Phospho-Ser
  MOD_RES (16)..(16): Modified Cys
  See specification as filed for detailed description of substitutions and preferred embodiments
KGKTRKKRPQRADSDCFS

SEQ ID NO: 3193 - protein, 18 aa, Artificial Sequence
  Description of Artificial Sequence: Synthetic peptide
  N-term H or Acetyl
  MOD_RES (14)..(14): Ser or Phospho-Ser
  MOD_RES (16)..(16): Modified Cys
  See specification as filed for detailed description of substitutions and preferred embodiments
KGKTRKKRPQRADSNCFA

SEQ ID NO: 3194 - protein, 18 aa, Artificial Sequence
  Description of Artificial Sequence: Synthetic peptide
  N-term H or Acetyl
  MOD_RES (14)..(14): Ser or Phospho-Ser
  MOD_RES (16)..(16): Modified Cys
  See specification as filed for detailed description of substitutions and preferred embodiments
KGKTRKKRPQRADSNCFS

SEQ ID NO: 3195 - protein, 18 aa, Artificial Sequence
  Description of Artificial Sequence: Synthetic peptide
  N-term H or Acetyl
  MOD_RES (16)..(16): Modified Cys
  MOD_RES (18)..(18): Ser or Phospho-Ser
  See specification as filed for detailed description of substitutions and preferred embodiments
KGKTRKKRPQRADSDCFS

SEQ ID NO: 3196 - protein, 18 aa, Artificial Sequence
  Description of Artificial Sequence: Synthetic peptide
  N-term H or Acetyl
  MOD_RES (16)..(16): Modified Cys
  MOD_RES (18)..(18): Ser or Phospho-Ser
  See specification as filed for detailed description of substitutions and preferred embodiments
KGKTRKKRPQRADSNCFS

SEQ ID NO: 3197 - protein, 18 aa, Artificial Sequence
  Description of Artificial Sequence: Synthetic peptide
  N-term H or Acetyl
  MOD_RES (14)..(14): Ser or Phospho-Ser
  MOD_RES (16)..(16): Modified Cys
  See specification as filed for detailed description of substitutions and preferred embodiments
KGKTRKKRPQRAESDCFA

SEQ ID NO: 3198 - protein, 18 aa, Artificial Sequence
  Description of Artificial Sequence: Synthetic peptide
  N-term H or Acetyl
  MOD_RES (14)..(14): Ser or Phospho-Ser
  MOD_RES (16)..(16): Modified Cys
  See specification as filed for detailed description of substitutions and preferred embodiments
KGKTRKKRPQRAESDCFS

SEQ ID NO: 3199 - protein, 18 aa, Artificial Sequence
  Description of Artificial Sequence: Synthetic peptide
  N-term H or Acetyl
  MOD_RES (14)..(14): Ser or Phospho-Ser
  MOD_RES (16)..(16): Modified Cys
  See specification as filed for detailed description of substitutions and preferred embodiments
KGKTRKKRPQRAESNCFA

SEQ ID NO: 3200 - protein, 18 aa, Artificial Sequence
  Description of Artificial Sequence: Synthetic peptide
  N-term H or Acetyl
  MOD_RES (14)..(14): Ser or Phospho-Ser
  MOD_RES (16)..(16): Modified Cys
  See specification as filed for detailed description of substitutions and preferred embodiments
KGKTRKKRPQRAESNCFS

SEQ ID NO: 3201 - protein, 18 aa, Artificial Sequence
  Description of Artificial Sequence: Synthetic peptide
  N-term H or Acetyl
  MOD_RES (16)..(16): Modified Cys
  MOD_RES (18)..(18): Ser or Phospho-Ser
  See specification as filed for detailed description of substitutions and preferred embodiments
KGKTRKKRPQRAESDCFS

SEQ ID NO: 3202 - protein, 18 aa, Artificial Sequence
  Description of Artificial Sequence: Synthetic peptide
  N-term H or Acetyl
  MOD_RES (16)..(16): Modified Cys
  MOD_RES (18)..(18): Ser or Phospho-Ser
  See specification as filed for detailed description of substitutions and preferred embodiments
KGKTRKKRPQRAESNCFS

SEQ ID NO: 3203 - protein, 18 aa, Artificial Sequence
  Description of Artificial Sequence: Synthetic peptide
  N-term H or Acetyl
  MOD_RES (14)..(14): Ser or Phospho-Ser
  MOD_RES (16)..(16): Modified Cys
  See specification as filed for detailed description of substitutions and preferred embodiments
KGKTRKKRPQRAHSDCFA

SEQ ID NO: 3204 - protein, 18 aa, Artificial Sequence
  Description of Artificial Sequence: Synthetic peptide
  N-term H or Acetyl
  MOD_RES (14)..(14): Ser or Phospho-Ser
  MOD_RES (16)..(16): Modified Cys
  See specification as filed for detailed description of substitutions and preferred embodiments
KGKTRKKRPQRAHSDCFS

SEQ ID NO: 3205 - protein, 18 aa, Artificial Sequence
  Description of Artificial Sequence: Synthetic peptide
  N-term H or Acetyl
  MOD_RES (14)..(14): Ser or Phospho-Ser
  MOD_RES (16)..(16): Modified Cys
  See specification as filed for detailed description of substitutions and preferred embodiments
KGKTRKKRPQRAHSNCFA

SEQ ID NO: 3206 - protein, 18 aa, Artificial Sequence
  Description of Artificial Sequence: Synthetic peptide
  N-term H or Acetyl
  MOD_RES (14)..(14): Ser or Phospho-Ser
  MOD_RES (16)..(16): Modified Cys
  See specification as filed for detailed description of substitutions and preferred embodiments
KGKTRKKRPQRAHSNCFS

SEQ ID NO: 3207 - protein, 18 aa, Artificial Sequence
  Description of Artificial Sequence: Synthetic peptide
  N-term H or Acetyl
  MOD_RES (16)..(16): Modified Cys
  MOD_RES (18)..(18): Ser or Phospho-Ser
  See specification as filed for detailed description of substitutions and preferred embodiments
KGKTRKKRPQRAHSDCFS

SEQ ID NO: 3208 - protein, 18 aa, Artificial Sequence
  Description of Artificial Sequence: Synthetic peptide
  N-term H or Acetyl
  MOD_RES (16)..(16): Modified Cys
  MOD_RES (18)..(18): Ser or Phospho-Ser
  See specification as filed for detailed description of substitutions and preferred embodiments
KGKTRKKRPQRAHSNCFS

SEQ ID NO: 3209 - protein, 18 aa, Artificial Sequence
  Description of Artificial Sequence: Synthetic peptide
  N-term H or Acetyl
  MOD_RES (14)..(14): Ser or Phospho-Ser
  MOD_RES (16)..(16): Modified Cys
  See specification as filed for detailed description of substitutions and preferred embodiments
KGKTRKKRPQRATSDCFA

SEQ ID NO: 3210 - protein, 18 aa, Artificial Sequence
  Description of Artificial Sequence: Synthetic peptide
  N-term H or Acetyl
  MOD_RES (14)..(14): Ser or Phospho-Ser
  MOD_RES (16)..(16): Modified Cys
  See specification as filed for detailed description of substitutions and preferred embodiments
KGKTRKKRPQRATSDCFS

SEQ ID NO: 3211 - protein, 18 aa, Artificial Sequence
  Description of Artificial Sequence: Synthetic peptide
  N-term H or Acetyl
  MOD_RES (14)..(14): Ser or Phospho-Ser
  MOD_RES (16)..(16): Modified Cys
  See specification as filed for detailed description of substitutions and preferred embodiments
KGKTRKKRPQRATSNCFA

SEQ ID NO: 3212 - protein, 18 aa, Artificial Sequence
  Description of Artificial Sequence: Synthetic peptide
  N-term H or Acetyl
  MOD_RES (14)..(14): Ser or Phospho-Ser
  MOD_RES (16)..(16): Modified Cys
  See specification as filed for detailed description of substitutions and preferred embodiments
KGKTRKKRPQRATSNCFS

SEQ ID NO: 3213 - protein, 18 aa, Artificial Sequence
  Description of Artificial Sequence: Synthetic peptide
  N-term H or Acetyl
  MOD_RES (16)..(16): Modified Cys
  MOD_RES (18)..(18): Ser or Phospho-Ser
  See specification as filed for detailed description of substitutions and preferred embodiments
KGKTRKKRPQRATSDCFS

SEQ ID NO: 3214 - protein, 18 aa, Artificial Sequence
  Description of Artificial Sequence: Synthetic peptide
  N-term H or Acetyl
  MOD_RES (16)..(16): Modified Cys
  MOD_RES (18)..(18): Ser or Phospho-Ser
  See specification as filed for detailed description of substitutions and preferred embodiments
KGKTRKKRPQRATSNCFS

SEQ ID NO: 3215 - protein, 18 aa, Artificial Sequence
  Description of Artificial Sequence: Synthetic peptide
  N-term H or Acetyl
  MOD_RES (14)..(14): Ser or Phospho-Ser
  MOD_RES (16)..(16): Modified Cys
  See specification as filed for detailed description of substitutions and preferred embodiments
KGKTTKKRPQRADSDCFA

SEQ ID NO: 3216 - protein, 18 aa, Artificial Sequence
  Description of Artificial Sequence: Synthetic peptide
  N-term H or Acetyl
  MOD_RES (14)..(14): Ser or Phospho-Ser
  MOD_RES (16)..(16): Modified Cys
  See specification as filed for detailed description of substitutions and preferred embodiments
KGKTTKKRPQRADSDCFS

SEQ ID NO: 3217 - protein, 18 aa, Artificial Sequence
  Description of Artificial Sequence: Synthetic peptide
  N-term H or Acetyl
  MOD_RES (14)..(14): Ser or Phospho-Ser
  MOD_RES (16)..(16): Modified Cys
  See specification as filed for detailed description of substitutions and preferred embodiments
KGKTTKKRPQRADSNCFA

SEQ ID NO: 3218 - protein, 18 aa, Artificial Sequence
  Description of Artificial Sequence: Synthetic peptide
  N-term H or Acetyl
  MOD_RES (14)..(14): Ser or Phospho-Ser
  MOD_RES (16)..(16): Modified Cys
  See specification as filed for detailed description of substitutions and preferred embodiments
KGKTTKKRPQRADSNCFS

SEQ ID NO: 3219 - protein, 18 aa, Artificial Sequence
  Description of Artificial Sequence: Synthetic peptide
  N-term H or Acetyl
  MOD_RES (16)..(16): Modified Cys
  MOD_RES (18)..(18): Ser or Phospho-Ser
  See specification as filed for detailed description of substitutions and preferred embodiments
KGKTTKKRPQRADSDCFS

SEQ ID NO: 3220 - protein, 18 aa, Artificial Sequence
  Description of Artificial Sequence: Synthetic peptide
  N-term H or Acetyl
  MOD_RES (16)..(16): Modified Cys
  MOD_RES (18)..(18): Ser or Phospho-Ser
  See specification as filed for detailed description of substitutions and preferred embodiments
KGKTTKKRPQRADSNCFS

SEQ ID NO: 3221 - protein, 18 aa, Artificial Sequence
  Description of Artificial Sequence: Synthetic peptide
  N-term H or Acetyl
  MOD_RES (14)..(14): Ser or Phospho-Ser
  MOD_RES (16)..(16): Modified Cys
  See specification as filed for detailed description of substitutions and preferred embodiments
KGKTTKKRPQRAESDCFA

SEQ ID NO: 3222 - protein, 18 aa, Artificial Sequence
  Description of Artificial Sequence: Synthetic peptide
  N-term H or Acetyl
  MOD_RES (14)..(14): Ser or Phospho-Ser
  MOD_RES (16)..(16): Modified Cys
  See specification as filed for detailed description of substitutions and preferred embodiments
KGKTTKKRPQRAESDCFS

SEQ ID NO: 3223 - protein, 18 aa, Artificial Sequence
  Description of Artificial Sequence: Synthetic peptide
  N-term H or Acetyl
  MOD_RES (14)..(14): Ser or Phospho-Ser
  MOD_RES (16)..(16): Modified Cys
  See specification as filed for detailed description of substitutions and preferred embodiments
KGKTTKKRPQRAESNCFA

SEQ ID NO: 3224 - protein, 18 aa, Artificial Sequence
  Description of Artificial Sequence: Synthetic peptide
  N-term H or Acetyl
  MOD_RES (14)..(14): Ser or Phospho-Ser
  MOD_RES (16)..(16): Modified Cys
  See specification as filed for detailed description of substitutions and preferred embodiments
KGKTTKKRPQRAESNCFS

SEQ ID NO: 3225 - protein, 18 aa, Artificial Sequence
  Description of Artificial Sequence: Synthetic peptide
  N-term H or Acetyl
  MOD_RES (16)..(16): Modified Cys
  MOD_RES (18)..(18): Ser or Phospho-Ser
  See specification as filed for detailed description of substitutions and preferred embodiments
KGKTTKKRPQRAESDCFS

SEQ ID NO: 3226 - protein, 18 aa, Artificial Sequence
  Description of Artificial Sequence: Synthetic peptide
  N-term H or Acetyl
  MOD_RES (16)..(16): Modified Cys
  MOD_RES (18)..(18): Ser or Phospho-Ser
  See specification as filed for detailed description of substitutions and preferred embodiments
KGKTTKKRPQRAESNCFS

SEQ ID NO: 3227 - protein, 18 aa, Artificial Sequence
  Description of Artificial Sequence: Synthetic peptide
  N-term H or Acetyl
  MOD_RES (14)..(14): Ser or Phospho-Ser
  MOD_RES (16)..(16): Modified Cys
  See specification as filed for detailed description of substitutions and preferred embodiments
KGKTTKKRPQRAHSDCFA

SEQ ID NO: 3228 - protein, 18 aa, Artificial Sequence
  Description of Artificial Sequence: Synthetic peptide
  N-term H or Acetyl
  MOD_RES (14)..(14): Ser or Phospho-Ser
  MOD_RES (16)..(16): Modified Cys
  See specification as filed for detailed description of substitutions and preferred embodiments
KGKTTKKRPQRAHSDCFS

SEQ ID NO: 3229 - protein, 18 aa, Artificial Sequence
  Description of Artificial Sequence: Synthetic peptide
  N-term H or Acetyl
  MOD_RES (14)..(14): Ser or Phospho-Ser
  MOD_RES (16)..(16): Modified Cys
  See specification as filed for detailed description of substitutions and preferred embodiments
KGKTTKKRPQRAHSNCFA

SEQ ID NO: 3230 - protein, 18 aa, Artificial Sequence
  Description of Artificial Sequence: Synthetic peptide
  N-term H or Acetyl
  MOD_RES (14)..(14): Ser or Phospho-Ser
  MOD_RES (16)..(16): Modified Cys
  See specification as filed for detailed description of substitutions and preferred embodiments
KGKTTKKRPQRAHSNCFS

SEQ ID NO: 3231 - protein, 18 aa, Artificial Sequence
  Description of Artificial Sequence: Synthetic peptide
  N-term H or Acetyl
  MOD_RES (16)..(16): Modified Cys
  MOD_RES (18)..(18): Ser or Phospho-Ser
  See specification as filed for detailed description of substitutions and preferred embodiments
KGKTTKKRPQRAHSDCFS

SEQ ID NO: 3232 - protein, 18 aa, Artificial Sequence
  Description of Artificial Sequence: Synthetic peptide
  N-term H or Acetyl
  MOD_RES (16)..(16): Modified Cys
  MOD_RES (18)..(18): Ser or Phospho-Ser
  See specification as filed for detailed description of substitutions and preferred embodiments
KGKTTKKRPQRAHSNCFS

SEQ ID NO: 3233 - protein, 18 aa, Artificial Sequence
  Description of Artificial Sequence: Synthetic peptide
  N-term H or Acetyl
  MOD_RES (14)..(14): Ser or Phospho-Ser
  MOD_RES (16)..(16): Modified Cys
  See specification as filed for detailed description of substitutions and preferred embodiments
KGKTTKKRPQRATSDCFA

SEQ ID NO: 3234 - protein, 18 aa, Artificial Sequence
  Description of Artificial Sequence: Synthetic peptide
  N-term H or Acetyl
  MOD_RES (14)..(14): Ser or Phospho-Ser
  MOD_RES (16)..(16): Modified Cys
  See specification as filed for detailed description of substitutions and preferred embodiments
KGKTTKKRPQRATSDCFS

SEQ ID NO: 3235 - protein, 18 aa, Artificial Sequence
  Description of Artificial Sequence: Synthetic peptide
  N-term H or Acetyl
  MOD_RES (14)..(14): Ser or Phospho-Ser
  MOD_RES (16)..(16): Modified Cys
  See specification as filed for detailed description of substitutions and preferred embodiments
KGKTTKKRPQRATSNCFA

SEQ ID NO: 3236 - protein, 18 aa, Artificial Sequence
  Description of Artificial Sequence: Synthetic peptide
  N-term H or Acetyl
  MOD_RES (14)..(14): Ser or Phospho-Ser
  MOD_RES (16)..(16): Modified Cys
  See specification as filed for detailed description of substitutions and preferred embodiments
KGKTTKKRPQRATSNCFS

SEQ ID NO: 3237 - protein, 18 aa, Artificial Sequence
  Description of Artificial Sequence: Synthetic peptide
  N-term H or Acetyl
  MOD_RES (16)..(16): Modified Cys
  MOD_RES (18)..(18): Ser or Phospho-Ser
  See specification as filed for detailed description of substitutions and preferred embodiments
KGKTTKKRPQRATSDCFS

SEQ ID NO: 3238 - protein, 18 aa, Artificial Sequence
  Description of Artificial Sequence: Synthetic peptide
  N-term H or Acetyl
  MOD_RES (16)..(16): Modified Cys
  MOD_RES (18)..(18): Ser or Phospho-Ser
  See specification as filed for detailed description of substitutions and preferred embodiments
KGKTTKKRPQRATSNCFS

SEQ ID NO: 3239 - protein, 18 aa, Artificial Sequence
  Description of Artificial Sequence: Synthetic peptide
  N-term H or Acetyl
  MOD_RES (14)..(14): Ser or Phospho-Ser
  MOD_RES (16)..(16): Modified Cys
  See specification as filed for detailed description of substitutions and preferred embodiments
KGKTVKKRPQRADSDCFA

SEQ ID NO: 3240 - protein, 18 aa, Artificial Sequence
  Description of Artificial Sequence: Synthetic peptide
  N-term H or Acetyl
  MOD_RES (14)..(14): Ser or Phospho-Ser
  MOD_RES (16)..(16): Modified Cys
  See specification as filed for detailed description of substitutions and preferred embodiments
KGKTVKKRPQRADSDCFS

SEQ ID NO: 3241 - protein, 18 aa, Artificial Sequence
  Description of Artificial Sequence: Synthetic peptide
  N-term H or Acetyl
  MOD_RES (14)..(14): Ser or Phospho-Ser
  MOD_RES (16)..(16): Modified Cys
  See specification as filed for detailed description of substitutions and preferred embodiments
KGKTVKKRPQRADSNCFA

SEQ ID NO: 3242 - protein, 18 aa, Artificial Sequence
  Description of Artificial Sequence: Synthetic peptide
  N-term H or Acetyl
  MOD_RES (14)..(14): Ser or Phospho-Ser
  MOD_RES (16)..(16): Modified Cys
  See specification as filed for detailed description of substitutions and preferred embodiments
KGKTVKKRPQRADSNCFS

SEQ ID NO: 3243 - protein, 18 aa, Artificial Sequence
  Description of Artificial Sequence: Synthetic peptide
  N-term H or Acetyl
  MOD_RES (16)..(16): Modified Cys
  MOD_RES (18)..(18): Ser or Phospho-Ser
  See specification as filed for detailed description of substitutions and preferred embodiments
KGKTVKKRPQRADSDCFS

SEQ ID NO: 3244 - protein, 18 aa, Artificial Sequence
  Description of Artificial Sequence: Synthetic peptide
  N-term H or Acetyl
  MOD_RES (16)..(16): Modified Cys
  MOD_RES (18)..(18): Ser or Phospho-Ser
  See specification as filed for detailed description of substitutions and preferred embodiments
KGKTVKKRPQRADSNCFS

SEQ ID NO: 3245 - protein, 18 aa, Artificial Sequence
  Description of Artificial Sequence: Synthetic peptide
  N-term H or Acetyl
  MOD_RES (14)..(14): Ser or Phospho-Ser
  MOD_RES (16)..(16): Modified Cys
  See specification as filed for detailed description of substitutions and preferred embodiments
KGKTVKKRPQRAESDCFA

SEQ ID NO: 3246 - protein, 18 aa, Artificial Sequence
  Description of Artificial Sequence: Synthetic peptide
  N-term H or Acetyl
  MOD_RES (14)..(14): Ser or Phospho-Ser
  MOD_RES (16)..(16): Modified Cys
  See specification as filed for detailed description of substitutions and preferred embodiments
KGKTVKKRPQRAESDCFS

SEQ ID NO: 3247 - protein, 18 aa, Artificial Sequence
  Description of Artificial Sequence: Synthetic peptide
  N-term H or Acetyl
  MOD_RES (14)..(14): Ser or Phospho-Ser
  MOD_RES (16)..(16): Modified Cys
  See specification as filed for detailed description of substitutions and preferred embodiments
KGKTVKKRPQRAESNCFA

SEQ ID NO: 3248 - protein, 18 aa, Artificial Sequence
  Description of Artificial Sequence: Synthetic peptide
  N-term H or Acetyl
  MOD_RES (14)..(14): Ser or Phospho-Ser
  MOD_RES (16)..(16): Modified Cys
  See specification as filed for detailed description of substitutions and preferred embodiments
KGKTVKKRPQRAESNCFS

SEQ ID NO: 3249 - protein, 18 aa, Artificial Sequence
  Description of Artificial Sequence: Synthetic peptide
  N-term H or Acetyl
  MOD_RES (16)..(16): Modified Cys
  MOD_RES (18)..(18): Ser or Phospho-Ser
  See specification as filed for detailed description of substitutions and preferred embodiments
KGKTVKKRPQRAESDCFS

SEQ ID NO: 3250 - protein, 18 aa, Artificial Sequence
  Description of Artificial Sequence: Synthetic peptide
  N-term H or Acetyl
  MOD_RES (16)..(16): Modified Cys
  MOD_RES (18)..(18): Ser or Phospho-Ser
  See specification as filed for detailed description of substitutions and preferred embodiments
KGKTVKKRPQRAESNCFS

SEQ ID NO: 3251 - protein, 18 aa, Artificial Sequence
  Description of Artificial Sequence: Synthetic peptide
  N-term H or Acetyl
  MOD_RES (14)..(14): Ser or Phospho-Ser
  MOD_RES (16)..(16): Modified Cys
  See specification as filed for detailed description of substitutions and preferred embodiments
KGKTVKKRPQRAHSDCFA

SEQ ID NO: 3252 - protein, 18 aa, Artificial Sequence
  Description of Artificial Sequence: Synthetic peptide
  N-term H or Acetyl
  MOD_RES (14)..(14): Ser or Phospho-Ser
  MOD_RES (16)..(16): Modified Cys
  See specification as filed for detailed description of substitutions and preferred embodiments
KGKTVKKRPQRAHSDCFS

SEQ ID NO: 3253 - protein, 18 aa, Artificial Sequence
  Description of Artificial Sequence: Synthetic peptide
  N-term H or Acetyl
  MOD_RES (14)..(14): Ser or Phospho-Ser
  MOD_RES (16)..(16): Modified Cys
  See specification as filed for detailed description of substitutions and preferred embodiments
KGKTVKKRPQRAHSNCFA

SEQ ID NO: 3254 - protein, 18 aa, Artificial Sequence
  Description of Artificial Sequence: Synthetic peptide
  N-term H or Acetyl
  MOD_RES (14)..(14): Ser or Phospho-Ser
  MOD_RES (16)..(16): Modified Cys
  See specification as filed for detailed description of substitutions and preferred embodiments
KGKTVKKRPQRAHSNCFS

SEQ ID NO: 3255 - protein, 18 aa, Artificial Sequence
  Description of Artificial Sequence: Synthetic peptide
  N-term H or Acetyl
  MOD_RES (16)..(16): Modified Cys
  MOD_RES (18)..(18): Ser or Phospho-Ser
  See specification as filed for detailed description of substitutions and preferred embodiments
KGKTVKKRPQRAHSDCFS

SEQ ID NO: 3256 - protein, 18 aa, Artificial Sequence
  Description of Artificial Sequence: Synthetic peptide
  N-term H or Acetyl
  MOD_RES (16)..(16): Modified Cys
  MOD_RES (18)..(18): Ser or Phospho-Ser
  See specification as filed for detailed description of substitutions and preferred embodiments
KGKTVKKRPQRAHSNCFS

SEQ ID NO: 3257 - protein, 18 aa, Artificial Sequence
  Description of Artificial Sequence: Synthetic peptide
  N-term H or Acetyl
  MOD_RES (14)..(14): Ser or Phospho-Ser
  MOD_RES (16)..(16): Modified Cys
  See specification as filed for detailed description of substitutions and preferred embodiments
KGKTVKKRPQRATSDCFA

SEQ ID NO: 3258 - protein, 18 aa, Artificial Sequence
  Description of Artificial Sequence: Synthetic peptide
  N-term H or Acetyl
  MOD_RES (14)..(14): Ser or Phospho-Ser
  MOD_RES (16)..(16): Modified Cys
  See specification as filed for detailed description of substitutions and preferred embodiments
KGKTVKKRPQRATSDCFS

SEQ ID NO: 3259 - protein, 18 aa, Artificial Sequence
  Description of Artificial Sequence: Synthetic peptide
  N-term H or Acetyl
  MOD_RES (14)..(14): Ser or Phospho-Ser
  MOD_RES (16)..(16): Modified Cys
  See specification as filed for detailed description of substitutions and preferred embodiments
KGKTVKKRPQRATSNCFA

SEQ ID NO: 3260 - protein, 18 aa, Artificial Sequence
  Description of Artificial Sequence: Synthetic peptide
  N-term H or Acetyl
  MOD_RES (14)..(14): Ser or Phospho-Ser
  MOD_RES (16)..(16): Modified Cys
  See specification as filed for detailed description of substitutions and preferred embodiments
KGKTVKKRPQRATSNCFS

SEQ ID NO: 3261 - protein, 18 aa, Artificial Sequence
  Description of Artificial Sequence: Synthetic peptide
  N-term H or Acetyl
  MOD_RES (16)..(16): Modified Cys
  MOD_RES (18)..(18): Ser or Phospho-Ser
  See specification as filed for detailed description of substitutions and preferred embodiments
KGKTVKKRPQRATSDCFS

SEQ ID NO: 3262 - protein, 18 aa, Artificial Sequence
  Description of Artificial Sequence: Synthetic peptide
  N-term H or Acetyl
  MOD_RES (16)..(16): Modified Cys
  MOD_RES (18)..(18): Ser or Phospho-Ser
  See specification as filed for detailed description of substitutions and preferred embodiments
KGKTVKKRPQRATSNCFS

SEQ ID NO: 3263 - protein, 15 aa, Artificial Sequence
  Description of Artificial Sequence: Synthetic peptide
  N-term H or Acetyl
  MOD_RES (8)..(8): Thr or Phospho-Thr
  MOD_RES (10)..(10): Modified Cys
  See specification as filed for detailed description of substitutions and preferred embodiments
KGRPQRATSCVFAMF

SEQ ID NO: 3264 - protein, 15 aa, Artificial Sequence
  Description of Artificial Sequence: Synthetic peptide
  N-term H or Acetyl
  MOD_RES (6)..(6): Modified Cys
  MOD_RES (8)..(8): Ser or Phospho-Ser
  See specification as filed for detailed description of substitutions and preferred embodiments
KGTLRCMSPEQISSQ

SEQ ID NO: 3265 - protein, 15 aa, Artificial Sequence
  Description of Artificial Sequence: Synthetic peptide
  N-term H or Acetyl
  MOD_RES (8)..(8): Ser or Phospho-Ser
  MOD_RES (10)..(10): Modified Cys
  See specification as filed for detailed description of substitutions and preferred embodiments
KGTLRYMSPCQISSQ

SEQ ID NO: 3266 - protein, 18 aa, Artificial Sequence
  Description of Artificial Sequence: Synthetic peptide
  N-term H or Acetyl
  MOD_RES (14)..(14): Ser or Phospho-Ser
  MOD_RES (16)..(16): Modified Cys
  See specification as filed for detailed description of substitutions and preferred embodiments
KHKKKKKRPQRADSDCFA

SEQ ID NO: 3267 - protein, 18 aa, Artificial Sequence
  Description of Artificial Sequence: Synthetic peptide
  N-term H or Acetyl
  MOD_RES (14)..(14): Ser or Phospho-Ser
  MOD_RES (16)..(16): Modified Cys
  See specification as filed for detailed description of substitutions and preferred embodiments
KHKKKKKRPQRADSDCFS

SEQ ID NO: 3268 - protein, 18 aa, Artificial Sequence
  Description of Artificial Sequence: Synthetic peptide
  N-term H or Acetyl
  MOD_RES (14)..(14): Ser or Phospho-Ser
  MOD_RES (16)..(16): Modified Cys
  See specification as filed for detailed description of substitutions and preferred embodiments
KHKKKKKRPQRADSNCFA

SEQ ID NO: 3269 - protein, 18 aa, Artificial Sequence
  Description of Artificial Sequence: Synthetic peptide
  N-term H or Acetyl
  MOD_RES (14)..(14): Ser or Phospho-Ser
  MOD_RES (16)..(16): Modified Cys
  See specification as filed for detailed description of substitutions and preferred embodiments
KHKKKKKRPQRADSNCFS

SEQ ID NO: 3270 - protein, 18 aa, Artificial Sequence
  Description of Artificial Sequence: Synthetic peptide
  N-term H or Acetyl
  MOD_RES (16)..(16): Modified Cys
  MOD_RES (18)..(18): Ser or Phospho-Ser
  See specification as filed for detailed description of substitutions and preferred embodiments
KHKKKKKRPQRADSDCFS

SEQ ID NO: 3271 - protein, 18 aa, Artificial Sequence
  Description of Artificial Sequence: Synthetic peptide
  N-term H or Acetyl
  MOD_RES (16)..(16): Modified Cys
  MOD_RES (18)..(18): Ser or Phospho-Ser
  See specification as filed for detailed description of substitutions and preferred embodiments
KHKKKKKRPQRADSNCFS

SEQ ID NO: 3272 - protein, 18 aa, Artificial Sequence
  Description of Artificial Sequence: Synthetic peptide
  N-term H or Acetyl
  MOD_RES (14)..(14): Ser or Phospho-Ser
  MOD_RES (16)..(16): Modified Cys
  See specification as filed for detailed description of substitutions and preferred embodiments
KHKKKKKRPQRAESDCFA

SEQ ID NO: 3273 - protein, 18 aa, Artificial Sequence
  Description of Artificial Sequence: Synthetic peptide
  N-term H or Acetyl
  MOD_RES (14)..(14): Ser or Phospho-Ser
  MOD_RES (16)..(16): Modified Cys
  See specification as filed for detailed description of substitutions and preferred embodiments
KHKKKKKRPQRAESDCFS

SEQ ID NO: 3274 - protein, 18 aa, Artificial Sequence
  Description of Artificial Sequence: Synthetic peptide
  N-term H or Acetyl
  MOD_RES (14)..(14): Ser or Phospho-Ser
  MOD_RES (16)..(16): Modified Cys
  See specification as filed for detailed description of substitutions and preferred embodiments
KHKKKKKRPQRAESNCFA

SEQ ID NO: 3275 - protein, 18 aa, Artificial Sequence
  Description of Artificial Sequence: Synthetic peptide
  N-term H or Acetyl
  MOD_RES (14)..(14): Ser or Phospho-Ser
  MOD_RES (16)..(16): Modified Cys
  See specification as filed for detailed description of substitutions and preferred embodiments
KHKKKKKRPQRAESNCFS

SEQ ID NO: 3276 - protein, 18 aa, Artificial Sequence
  Description of Artificial Sequence: Synthetic peptide
  N-term H or Acetyl
  MOD_RES (16)..(16): Modified Cys
  MOD_RES (18)..(18): Ser or Phospho-Ser
  See specification as filed for detailed description of substitutions and preferred embodiments
KHKKKKKRPQRAESDCFS

SEQ ID NO: 3277 - protein, 18 aa, Artificial Sequence
  Description of Artificial Sequence: Synthetic peptide
  N-term H or Acetyl
  MOD_RES (16)..(16): Modified Cys
  MOD_RES (18)..(18): Ser or Phospho-Ser
  See specification as filed for detailed description of substitutions and preferred embodiments
KHKKKKKRPQRAESNCFS

SEQ ID NO: 3278 - protein, 18 aa, Artificial Sequence
  Description of Artificial Sequence: Synthetic peptide
  N-term H or Acetyl
  MOD_RES (14)..(14): Ser or Phospho-Ser
  MOD_RES (16)..(16): Modified Cys
  See specification as filed for detailed description of substitutions and preferred embodiments
KHKKKKKRPQRAHSDCFA

SEQ ID NO: 3279 - protein, 18 aa, Artificial Sequence
  Description of Artificial Sequence: Synthetic peptide
  N-term H or Acetyl
  MOD_RES (14)..(14): Ser or Phospho-Ser
  MOD_RES (16)..(16): Modified Cys
  See specification as filed for detailed description of substitutions and preferred embodiments
KHKKKKKRPQRAHSDCFS

SEQ ID NO: 3280 - protein, 18 aa, Artificial Sequence
  Description of Artificial Sequence: Synthetic peptide
  N-term H or Acetyl
  MOD_RES (14)..(14): Ser or Phospho-Ser
  MOD_RES (16)..(16): Modified Cys
  See specification as filed for detailed description of substitutions and preferred embodiments
KHKKKKKRPQRAHSNCFA

SEQ ID NO: 3281 - protein, 18 aa, Artificial Sequence
  Description of Artificial Sequence: Synthetic peptide
  N-term H or Acetyl
  MOD_RES (14)..(14): Ser or Phospho-Ser
  MOD_RES (16)..(16): Modified Cys
  See specification as filed for detailed description of substitutions and preferred embodiments
KHKKKKKRPQRAHSNCFS

SEQ ID NO: 3282 - protein, 18 aa, Artificial Sequence
  Description of Artificial Sequence: Synthetic peptide
  N-term H or Acetyl
  MOD_RES (16)..(16): Modified Cys
  MOD_RES (18)..(18): Ser or Phospho-Ser
  See specification as filed for detailed description of substitutions and preferred embodiments
KHKKKKKRPQRAHSDCFS

SEQ ID NO: 3283 - protein, 18 aa, Artificial Sequence
  Description of Artificial Sequence: Synthetic peptide
  N-term H or Acetyl
  MOD_RES (16)..(16): Modified Cys
  MOD_RES (18)..(18): Ser or Phospho-Ser
  See specification as filed for detailed description of substitutions and preferred embodiments
KHKKKKKRPQRAHSNCFS

SEQ ID NO: 3284 - protein, 18 aa, Artificial Sequence
  Description of Artificial Sequence: Synthetic peptide
  N-term H or Acetyl
  MOD_RES (14)..(14): Ser or Phospho-Ser
  MOD_RES (16)..(16): Modified Cys
  See specification as filed for detailed description of substitutions and preferred embodiments
KHKKKKKRPQRATSDCFA

SEQ ID NO: 3285 - protein, 18 aa, Artificial Sequence
  Description of Artificial Sequence: Synthetic peptide
  N-term H or Acetyl
  MOD_RES (14)..(14): Ser or Phospho-Ser
  MOD_RES (16)..(16): Modified Cys
  See specification as filed for detailed description of substitutions and preferred embodiments
KHKKKKKRPQRATSDCFS

SEQ ID NO: 3286 - protein, 18 aa, Artificial Sequence
  Description of Artificial Sequence: Synthetic peptide
  N-term H or Acetyl
  MOD_RES (14)..(14): Ser or Phospho-Ser
  MOD_RES (16)..(16): Modified Cys
  See specification as filed for detailed description of substitutions and preferred embodiments
KHKKKKKRPQRATSNCFA

SEQ ID NO: 3287 - protein, 18 aa, Artificial Sequence
  Description of Artificial Sequence: Synthetic peptide
  N-term H or Acetyl
  MOD_RES (14)..(14): Ser or Phospho-Ser
  MOD_RES (16)..(16): Modified Cys
  See specification as filed for detailed description of substitutions and preferred embodiments
KHKKKKKRPQRATSNCFS

SEQ ID NO: 3288 - protein, 18 aa, Artificial Sequence
  Description of Artificial Sequence: Synthetic peptide
  N-term H or Acetyl
  MOD_RES (16)..(16): Modified Cys
  MOD_RES (18)..(18): Ser or Phospho-Ser
  See specification as filed for detailed description of substitutions and preferred embodiments
KHKKKKKRPQRATSDCFS

SEQ ID NO: 3289 - protein, 18 aa, Artificial Sequence
  Description of Artificial Sequence: Synthetic peptide
  N-term H or Acetyl
  MOD_RES (16)..(16): Modified Cys
  MOD_RES (18)..(18): Ser or Phospho-Ser
  See specification as filed for detailed description of substitutions and preferred embodiments
KHKKKKKRPQRATSNCFS

SEQ ID NO: 3290 - protein, 18 aa, Artificial Sequence
  Description of Artificial Sequence: Synthetic peptide
  N-term H or Acetyl
  MOD_RES (14)..(14): Ser or Phospho-Ser
  MOD_RES (16)..(16): Modified Cys
  See specification as filed for detailed description of substitutions and preferred embodiments
KHKKRKKRPQRADSDCFA

SEQ ID NO: 3291 - protein, 18 aa, Artificial Sequence
  Description of Artificial Sequence: Synthetic peptide
  N-term H or Acetyl
  MOD_RES (14)..(14): Ser or Phospho-Ser
  MOD_RES (16)..(16): Modified Cys
  See specification as filed for detailed description of substitutions and preferred embodiments
KHKKRKKRPQRADSDCFS

SEQ ID NO: 3292 - protein, 18 aa, Artificial Sequence
  Description of Artificial Sequence: Synthetic peptide
  N-term H or Acetyl
  MOD_RES (14)..(14): Ser or Phospho-Ser
  MOD_RES (16)..(16): Modified Cys
  See specification as filed for detailed description of substitutions and preferred embodiments
KHKKRKKRPQRADSNCFA

SEQ ID NO: 3293 - protein, 18 aa, Artificial Sequence
  Description of Artificial Sequence: Synthetic peptide
  N-term H or Acetyl
  MOD_RES (14)..(14): Ser or Phospho-Ser
  MOD_RES (16)..(16): Modified Cys
  See specification as filed for detailed description of substitutions and preferred embodiments
KHKKRKKRPQRADSNCFS

SEQ ID NO: 3294 - protein, 18 aa, Artificial Sequence
  Description of Artificial Sequence: Synthetic peptide
  N-term H or Acetyl
  MOD_RES (16)..(16): Modified Cys
  MOD_RES (18)..(18): Ser or Phospho-Ser
  See specification as filed for detailed description of substitutions and preferred embodiments
KHKKRKKRPQRADSDCFS

SEQ ID NO: 3295 - protein, 18 aa, Artificial Sequence
  Description of Artificial Sequence: Synthetic peptide
  N-term H or Acetyl
  MOD_RES (16)..(16): Modified Cys
  MOD_RES (18)..(18): Ser or Phospho-Ser
  See specification as filed for detailed description of substitutions and preferred embodiments
KHKKRKKRPQRADSNCFS

SEQ ID NO: 3296 - protein, 18 aa, Artificial Sequence
  Description of Artificial Sequence: Synthetic peptide
  N-term H or Acetyl
  MOD_RES (14)..(14): Ser or Phospho-Ser
  MOD_RES (16)..(16): Modified Cys
  See specification as filed for detailed description of substitutions and preferred embodiments
KHKKRKKRPQRAESDCFA

SEQ ID NO: 3297 - protein, 18 aa, Artificial Sequence
  Description of Artificial Sequence: Synthetic peptide
  N-term H or Acetyl
  MOD_RES (14)..(14): Ser or Phospho-Ser
  MOD_RES (16)..(16): Modified Cys
  See specification as filed for detailed description of substitutions and preferred embodiments
KHKKRKKRPQRAESDCFS

SEQ ID NO: 3298 - protein, 18 aa, Artificial Sequence
  Description of Artificial Sequence: Synthetic peptide
  N-term H or Acetyl
  MOD_RES (14)..(14): Ser or Phospho-Ser
  MOD_RES (16)..(16): Modified Cys
  See specification as filed for detailed description of substitutions and preferred embodiments
KHKKRKKRPQRAESNCFA

SEQ ID NO: 3299 - protein, 18 aa, Artificial Sequence
  Description of Artificial Sequence: Synthetic peptide
  N-term H or Acetyl
  MOD_RES (14)..(14): Ser or Phospho-Ser
  MOD_RES (16)..(16): Modified Cys
  See specification as filed for detailed description of substitutions and preferred embodiments
KHKKRKKRPQRAESNCFS

SEQ ID NO: 3300 - protein, 18 aa, Artificial Sequence
  Description of Artificial Sequence: Synthetic peptide
  N-term H or Acetyl
  MOD_RES (16)..(16): Modified Cys
  MOD_RES (18)..(18): Ser or Phospho-Ser
  See specification as filed for detailed description of substitutions and preferred embodiments
KHKKRKKRPQRAESDCFS

SEQ ID NO: 3301 - protein, 18 aa, Artificial Sequence
  Description of Artificial Sequence: Synthetic peptide
  N-term H or Acetyl
  MOD_RES (16)..(16): Modified Cys
  MOD_RES (18)..(18): Ser or Phospho-Ser
  See specification as filed for detailed description of substitutions and preferred embodiments
KHKKRKKRPQRAESNCFS

SEQ ID NO: 3302 - protein, 18 aa, Artificial Sequence
  Description of Artificial Sequence: Synthetic peptide
  N-term H or Acetyl
  MOD_RES (14)..(14): Ser or Phospho-Ser
  MOD_RES (16)..(16): Modified Cys
  See specification as filed for detailed description of substitutions and preferred embodiments
KHKKRKKRPQRAHSDCFA

SEQ ID NO: 3303 - protein, 18 aa, Artificial Sequence
  Description of Artificial Sequence: Synthetic peptide
  N-term H or Acetyl
  MOD_RES (14)..(14): Ser or Phospho-Ser
  MOD_RES (16)..(16): Modified Cys
  See specification as filed for detailed description of substitutions and preferred embodiments
KHKKRKKRPQRAHSDCFS

SEQ ID NO: 3304 - protein, 18 aa, Artificial Sequence
  Description of Artificial Sequence: Synthetic peptide
  N-term H or Acetyl
  MOD_RES (14)..(14): Ser or Phospho-Ser
  MOD_RES (16)..(16): Modified Cys
  See specification as filed for detailed description of substitutions and preferred embodiments
KHKKRKKRPQRAHSNCFA

SEQ ID NO: 3305 - protein, 18 aa, Artificial Sequence
  Description of Artificial Sequence: Synthetic peptide
  N-term H or Acetyl
  MOD_RES (14)..(14): Ser or Phospho-Ser
  MOD_RES (16)..(16): Modified Cys
  See specification as filed for detailed description of substitutions and preferred embodiments
KHKKRKKRPQRAHSNCFS

SEQ ID NO: 3306 - protein, 18 aa, Artificial Sequence
  Description of Artificial Sequence: Synthetic peptide
  N-term H or Acetyl
  MOD_RES (16)..(16): Modified Cys
  MOD_RES (18)..(18): Ser or Phospho-Ser
  See specification as filed for detailed description of substitutions and preferred embodiments
KHKKRKKRPQRAHSDCFS

SEQ ID NO: 3307 - protein, 18 aa, Artificial Sequence
  Description of Artificial Sequence: Synthetic peptide
  N-term H or Acetyl
  MOD_RES (16)..(16): Modified Cys
  MOD_RES (18)..(18): Ser or Phospho-Ser
  See specification as filed for detailed description of substitutions and preferred embodiments
KHKKRKKRPQRAHSNCFS

SEQ ID NO: 3308 - protein, 18 aa, Artificial Sequence
  Description of Artificial Sequence: Synthetic peptide
  N-term H or Acetyl
  MOD_RES (14)..(14): Ser or Phospho-Ser
  MOD_RES (16)..(16): Modified Cys
  See specification as filed for detailed description of substitutions and preferred embodiments
KHKKRKKRPQRATSDCFA

SEQ ID NO: 3309 - protein, 18 aa, Artificial Sequence
  Description of Artificial Sequence: Synthetic peptide
  N-term H or Acetyl
  MOD_RES (14)..(14): Ser or Phospho-Ser
  MOD_RES (16)..(16): Modified Cys
  See specification as filed for detailed description of substitutions and preferred embodiments
KHKKRKKRPQRATSDCFS

SEQ ID NO: 3310 - protein, 18 aa, Artificial Sequence
  Description of Artificial Sequence: Synthetic peptide
  N-term H or Acetyl
  MOD_RES (14)..(14): Ser or Phospho-Ser
  MOD_RES (16)..(16): Modified Cys
  See specification as filed for detailed description of substitutions and preferred embodiments
KHKKRKKRPQRATSNCFA

SEQ ID NO: 3311 - protein, 18 aa, Artificial Sequence
  Description of Artificial Sequence: Synthetic peptide
  N-term H or Acetyl
  MOD_RES (14)..(14): Ser or Phospho-Ser
  MOD_RES (16)..(16): Modified Cys
  See specification as filed for detailed description of substitutions and preferred embodiments
KHKKRKKRPQRATSNCFS

SEQ ID NO: 3312 - protein, 18 aa, Artificial Sequence
  Description of Artificial Sequence: Synthetic peptide
  N-term H or Acetyl
  MOD_RES (16)..(16): Modified Cys
  MOD_RES (18)..(18): Ser or Phospho-Ser
  See specification as filed for detailed description of substitutions and preferred embodiments
KHKKRKKRPQRATSDCFS

SEQ ID NO: 3313 - protein, 18 aa, Artificial Sequence
  Description of Artificial Sequence: Synthetic peptide
  N-term H or Acetyl
  MOD_RES (16)..(16): Modified Cys
  MOD_RES (18)..(18): Ser or Phospho-Ser
  See specification as filed for detailed description of substitutions and preferred embodiments
KHKKRKKRPQRATSNCFS

SEQ ID NO: 3314 - protein, 18 aa, Artificial Sequence
  Description of Artificial Sequence: Synthetic peptide
  N-term H or Acetyl
  MOD_RES (14)..(14): Ser or Phospho-Ser
  MOD_RES (16)..(16): Modified Cys
  See specification as filed for detailed description of substitutions and preferred embodiments
KHKKTKKRPQRADSDCFA

SEQ ID NO: 3315 - protein, 18 aa, Artificial Sequence
  Description of Artificial Sequence: Synthetic peptide
  N-term H or Acetyl
  MOD_RES (14)..(14): Ser or Phospho-Ser
  MOD_RES (16)..(16): Modified Cys
  See specification as filed for detailed description of substitutions and preferred embodiments
KHKKTKKRPQRADSDCFS

SEQ ID NO: 3316 - protein, 18 aa, Artificial Sequence
  Description of Artificial Sequence: Synthetic peptide
  N-term H or Acetyl
  MOD_RES (14)..(14): Ser or Phospho-Ser
  MOD_RES (16)..(16): Modified Cys
  See specification as filed for detailed description of substitutions and preferred embodiments
KHKKTKKRPQRADSNCFA

SEQ ID NO: 3317 - protein, 18 aa, Artificial Sequence
  Description of Artificial Sequence: Synthetic peptide
  N-term H or Acetyl
  MOD_RES (14)..(14): Ser or Phospho-Ser
  MOD_RES (16)..(16): Modified Cys
  See specification as filed for detailed description of substitutions and preferred embodiments
KHKKTKKRPQRADSNCFS

SEQ ID NO: 3318 - protein, 18 aa, Artificial Sequence
  Description of Artificial Sequence: Synthetic peptide
  N-term H or Acetyl
  MOD_RES (16)..(16): Modified Cys
  MOD_RES (18)..(18): Ser or Phospho-Ser
  See specification as filed for detailed description of substitutions and preferred embodiments
KHKKTKKRPQRADSDCFS

SEQ ID NO: 3319 - protein, 18 aa, Artificial Sequence
  Description of Artificial Sequence: Synthetic peptide
  N-term H or Acetyl
  MOD_RES (16)..(16): Modified Cys
  MOD_RES (18)..(18): Ser or Phospho-Ser
  See specification as filed for detailed description of substitutions and preferred embodiments
KHKKTKKRPQRADSNCFS

SEQ ID NO: 3320 - protein, 18 aa, Artificial Sequence
  Description of Artificial Sequence: Synthetic peptide
  N-term H or Acetyl
  MOD_RES (14)..(14): Ser or Phospho-Ser
  MOD_RES (16)..(16): Modified Cys
  See specification as filed for detailed description of substitutions and preferred embodiments
KHKKTKKRPQRAESDCFA

SEQ ID NO: 3321 - protein, 18 aa, Artificial Sequence
  Description of Artificial Sequence: Synthetic peptide
  N-term H or Acetyl
  MOD_RES (14)..(14): Ser or Phospho-Ser
  MOD_RES (16)..(16): Modified Cys
  See specification as filed for detailed description of substitutions and preferred embodiments
KHKKTKKRPQRAESDCFS

SEQ ID NO: 3322 - protein, 18 aa, Artificial Sequence
  Description of Artificial Sequence: Synthetic peptide
  N-term H or Acetyl
  MOD_RES (14)..(14): Ser or Phospho-Ser
  MOD_RES (16)..(16): Modified Cys
  See specification as filed for detailed description of substitutions and preferred embodiments
KHKKTKKRPQRAESNCFA

SEQ ID NO: 3323 - protein, 18 aa, Artificial Sequence
  Description of Artificial Sequence: Synthetic peptide
  N-term H or Acetyl
  MOD_RES (14)..(14): Ser or Phospho-Ser
  MOD_RES (16)..(16): Modified Cys
  See specification as filed for detailed description of substitutions and preferred embodiments
KHKKTKKRPQRAESNCFS

SEQ ID NO: 3324 - protein, 18 aa, Artificial Sequence
  Description of Artificial Sequence: Synthetic peptide
  N-term H or Acetyl
  MOD_RES (16)..(16): Modified Cys
  MOD_RES (18)..(18): Ser or Phospho-Ser
  See specification as filed for detailed description of substitutions and preferred embodiments
KHKKTKKRPQRAESDCFS

SEQ ID NO: 3325 - protein, 18 aa, Artificial Sequence
  Description of Artificial Sequence: Synthetic peptide
  N-term H or Acetyl
  MOD_RES (16)..(16): Modified Cys
  MOD_RES (18)..(18): Ser or Phospho-Ser
  See specification as filed for detailed description of substitutions and preferred embodiments
KHKKTKKRPQRAESNCFS

SEQ ID NO: 3326 - protein, 18 aa, Artificial Sequence
  Description of Artificial Sequence: Synthetic peptide
  N-term H or Acetyl
  MOD_RES (14)..(14): Ser or Phospho-Ser
  MOD_RES (16)..(16): Modified Cys
  See specification as filed for detailed description of substitutions and preferred embodiments
KHKKTKKRPQRAHSDCFA

SEQ ID NO: 3327 - protein, 18 aa, Artificial Sequence
  Description of Artificial Sequence: Synthetic peptide
  N-term H or Acetyl
  MOD_RES (14)..(14): Ser or Phospho-Ser
  MOD_RES (16)..(16): Modified Cys
  See specification as filed for detailed description of substitutions and preferred embodiments
KHKKTKKRPQRAHSDCFS

SEQ ID NO: 3328 - protein, 18 aa, Artificial Sequence
  Description of Artificial Sequence: Synthetic peptide
  N-term H or Acetyl
  MOD_RES (14)..(14): Ser or Phospho-Ser
  MOD_RES (16)..(16): Modified Cys
  See specification as filed for detailed description of substitutions and preferred embodiments
KHKKTKKRPQRAHSNCFA

SEQ ID NO: 3329 - protein, 18 aa, Artificial Sequence
  Description of Artificial Sequence: Synthetic peptide
  N-term H or Acetyl
  MOD_RES (14)..(14): Ser or Phospho-Ser
  MOD_RES (16)..(16): Modified Cys
  See specification as filed for detailed description of substitutions and preferred embodiments
KHKKTKKRPQRAHSNCFS

SEQ ID NO: 3330 - protein, 18 aa, Artificial Sequence
  Description of Artificial Sequence: Synthetic peptide
  N-term H or Acetyl
  MOD_RES (16)..(16): Modified Cys
  MOD_RES (18)..(18): Ser or Phospho-Ser
  See specification as filed for detailed description of substitutions and preferred embodiments
KHKKTKKRPQRAHSDCFS

SEQ ID NO: 3331 - protein, 18 aa, Artificial Sequence
  Description of Artificial Sequence: Synthetic peptide
  N-term H or Acetyl
  MOD_RES (16)..(16): Modified Cys
  MOD_RES (18)..(18): Ser or Phospho-Ser
  See specification as filed for detailed description of substitutions and preferred embodiments
KHKKTKKRPQRAHSNCFS

SEQ ID NO: 3332 - protein, 18 aa, Artificial Sequence
  Description of Artificial Sequence: Synthetic peptide
  N-term H or Acetyl
  MOD_RES (14)..(14): Ser or Phospho-Ser
  MOD_RES (16)..(16): Modified Cys
  See specification as filed for detailed description of substitutions and preferred embodiments
KHKKTKKRPQRATSDCFA

SEQ ID NO: 3333 - protein, 18 aa, Artificial Sequence
  Description of Artificial Sequence: Synthetic peptide
  N-term H or Acetyl
  MOD_RES (14)..(14): Ser or Phospho-Ser
  MOD_RES (16)..(16): Modified Cys
  See specification as filed for detailed description of substitutions and preferred embodiments
KHKKTKKRPQRATSDCFS

SEQ ID NO: 3334 - protein, 18 aa, Artificial Sequence
  Description of Artificial Sequence: Synthetic peptide
  N-term H or Acetyl
  MOD_RES (14)..(14): Ser or Phospho-Ser
  MOD_RES (16)..(16): Modified Cys
  See specification as filed for detailed description of substitutions and preferred embodiments
KHKKTKKRPQRATSNCFA

SEQ ID NO: 3335 - protein, 18 aa, Artificial Sequence
  Description of Artificial Sequence: Synthetic peptide
  N-term H or Acetyl
  MOD_RES (14)..(14): Ser or Phospho-Ser
  MOD_RES (16)..(16): Modified Cys
  See specification as filed for detailed description of substitutions and preferred embodiments
KHKKTKKRPQRATSNCFS

SEQ ID NO: 3336 - protein, 18 aa, Artificial Sequence
  Description of Artificial Sequence: Synthetic peptide
  N-term H or Acetyl
  MOD_RES (16)..(16): Modified Cys
  MOD_RES (18)..(18): Ser or Phospho-Ser
  See specification as filed for detailed description of substitutions and preferred embodiments
KHKKTKKRPQRATSDCFS

SEQ ID NO: 3337 - protein, 18 aa, Artificial Sequence
  Description of Artificial Sequence: Synthetic peptide
  N-term H or Acetyl
  MOD_RES (16)..(16): Modified Cys
  MOD_RES (18)..(18): Ser or Phospho-Ser
  See specification as filed for detailed description of substitutions and preferred embodiments
KHKKTKKRPQRATSNCFS

SEQ ID NO: 3338 - protein, 18 aa, Artificial Sequence
  Description of Artificial Sequence: Synthetic peptide
  N-term H or Acetyl
  MOD_RES (14)..(14): Ser or Phospho-Ser
  MOD_RES (16)..(16): Modified Cys
  See specification as filed for detailed description of substitutions and preferred embodiments
KHKKVKKRPQRADSDCFA

SEQ ID NO: 3339 - protein, 18 aa, Artificial Sequence
  Description of Artificial Sequence: Synthetic peptide
  N-term H or Acetyl
  MOD_RES (14)..(14): Ser or Phospho-Ser
  MOD_RES (16)..(16): Modified Cys
  See specification as filed for detailed description of substitutions and preferred embodiments
KHKKVKKRPQRADSDCFS

SEQ ID NO: 3340 - protein, 18 aa, Artificial Sequence
  Description of Artificial Sequence: Synthetic peptide
  N-term H or Acetyl
  MOD_RES (14)..(14): Ser or Phospho-Ser
  MOD_RES (16)..(16): Modified Cys
  See specification as filed for detailed description of substitutions and preferred embodiments
KHKKVKKRPQRADSNCFA

SEQ ID NO: 3341 - protein, 18 aa, Artificial Sequence
  Description of Artificial Sequence: Synthetic peptide
  N-term H or Acetyl
  MOD_RES (14)..(14): Ser or Phospho-Ser
  MOD_RES (16)..(16): Modified Cys
  See specification as filed for detailed description of substitutions and preferred embodiments
KHKKVKKRPQRADSNCFS

SEQ ID NO: 3342 - protein, 18 aa, Artificial Sequence
  Description of Artificial Sequence: Synthetic peptide
  N-term H or Acetyl
  MOD_RES (16)..(16): Modified Cys
  MOD_RES (18)..(18): Ser or Phospho-Ser
  See specification as filed for detailed description of substitutions and preferred embodiments
KHKKVKKRPQRADSDCFS

SEQ ID NO: 3343 - protein, 18 aa, Artificial Sequence
  Description of Artificial Sequence: Synthetic peptide
  N-term H or Acetyl
  MOD_RES (16)..(16): Modified Cys
  MOD_RES (18)..(18): Ser or Phospho-Ser
  See specification as filed for detailed description of substitutions and preferred embodiments
KHKKVKKRPQRADSNCFS

SEQ ID NO: 3344 - protein, 18 aa, Artificial Sequence
  Description of Artificial Sequence: Synthetic peptide
  N-term H or Acetyl
  MOD_RES (14)..(14): Ser or Phospho-Ser
  MOD_RES (16)..(16): Modified Cys
  See specification as filed for detailed description of substitutions and preferred embodiments
KHKKVKKRPQRAESDCFA

SEQ ID NO: 3345 - protein, 18 aa, Artificial Sequence
  Description of Artificial Sequence: Synthetic peptide
  N-term H or Acetyl
  MOD_RES (14)..(14): Ser or Phospho-Ser
  MOD_RES (16)..(16): Modified Cys
  See specification as filed for detailed description of substitutions and preferred embodiments
KHKKVKKRPQRAESDCFS

SEQ ID NO: 3346 - protein, 18 aa, Artificial Sequence
  Description of Artificial Sequence: Synthetic peptide
  N-term H or Acetyl
  MOD_RES (14)..(14): Ser or Phospho-Ser
  MOD_RES (16)..(16): Modified Cys
  See specification as filed for detailed description of substitutions and preferred embodiments
KHKKVKKRPQRAESNCFA

SEQ ID NO: 3347 - protein, 18 aa, Artificial Sequence
  Description of Artificial Sequence: Synthetic peptide
  N-term H or Acetyl
  MOD_RES (14)..(14): Ser or Phospho-Ser
  MOD_RES (16)..(16): Modified Cys
  See specification as filed for detailed description of substitutions and preferred embodiments
KHKKVKKRPQRAESNCFS

SEQ ID NO: 3348 - protein, 18 aa, Artificial Sequence
  Description of Artificial Sequence: Synthetic peptide
  N-term H or Acetyl
  MOD_RES (16)..(16): Modified Cys
  MOD_RES (18)..(18): Ser or Phospho-Ser
  See specification as filed for detailed description of substitutions and preferred embodiments
KHKKVKKRPQRAESDCFS

SEQ ID NO: 3349 - protein, 18 aa, Artificial Sequence
  Description of Artificial Sequence: Synthetic peptide
  N-term H or Acetyl
  MOD_RES (16)..(16): Modified Cys
  MOD_RES (18)..(18): Ser or Phospho-Ser
  See specification as filed for detailed description of substitutions and preferred embodiments
KHKKVKKRPQRAESNCFS

SEQ ID NO: 3350 - protein, 18 aa, Artificial Sequence
  Description of Artificial Sequence: Synthetic peptide
  N-term H or Acetyl
  MOD_RES (14)..(14): Ser or Phospho-Ser
  MOD_RES (16)..(16): Modified Cys
  See specification as filed for detailed description of substitutions and preferred embodiments
KHKKVKKRPQRAHSDCFA

SEQ ID NO: 3351 - protein, 18 aa, Artificial Sequence
  Description of Artificial Sequence: Synthetic peptide
  N-term H or Acetyl
  MOD_RES (14)..(14): Ser or Phospho-Ser
  MOD_RES (16)..(16): Modified Cys
  See specification as filed for detailed description of substitutions and preferred embodiments
KHKKVKKRPQRAHSDCFS

SEQ ID NO: 3352 - protein, 18 aa, Artificial Sequence
  Description of Artificial Sequence: Synthetic peptide
  N-term H or Acetyl
  MOD_RES (14)..(14): Ser or Phospho-Ser
  MOD_RES (16)..(16): Modified Cys
  See specification as filed for detailed description of substitutions and preferred embodiments
KHKKVKKRPQRAHSNCFA

SEQ ID NO: 3353 - protein, 18 aa, Artificial Sequence
  Description of Artificial Sequence: Synthetic peptide
  N-term H or Acetyl
  MOD_RES (14)..(14): Ser or Phospho-Ser
  MOD_RES (16)..(16): Modified Cys
  See specification as filed for detailed description of substitutions and preferred embodiments
KHKKVKKRPQRAHSNCFS

SEQ ID NO: 3354 - protein, 18 aa, Artificial Sequence
  Description of Artificial Sequence: Synthetic peptide
  N-term H or Acetyl
  MOD_RES (16)..(16): Modified Cys
  MOD_RES (18)..(18): Ser or Phospho-Ser
  See specification as filed for detailed description of substitutions and preferred embodiments
KHKKVKKRPQRAHSDCFS

SEQ ID NO: 3355 - protein, 18 aa, Artificial Sequence
  Description of Artificial Sequence: Synthetic peptide
  N-term H or Acetyl
  MOD_RES (16)..(16): Modified Cys
  MOD_RES (18)..(18): Ser or Phospho-Ser
  See specification as filed for detailed description of substitutions and preferred embodiments
KHKKVKKRPQRAHSNCFS

SEQ ID NO: 3356 - protein, 18 aa, Artificial Sequence
  Description of Artificial Sequence: Synthetic peptide
  N-term H or Acetyl
  MOD_RES (14)..(14): Ser or Phospho-Ser
  MOD_RES (16)..(16): Modified Cys
  See specification as filed for detailed description of substitutions and preferred embodiments
KHKKVKKRPQRATSDCFA

SEQ ID NO: 3357 - protein, 18 aa, Artificial Sequence
  Description of Artificial Sequence: Synthetic peptide
  N-term H or Acetyl
  MOD_RES (14)..(14): Ser or Phospho-Ser
  MOD_RES (16)..(16): Modified Cys
  See specification as filed for detailed description of substitutions and preferred embodiments
KHKKVKKRPQRATSDCFS

SEQ ID NO: 3358 - protein, 18 aa, Artificial Sequence
  Description of Artificial Sequence: Synthetic peptide
  N-term H or Acetyl
  MOD_RES (14)..(14): Ser or Phospho-Ser
  MOD_RES (16)..(16): Modified Cys
  See specification as filed for detailed description of substitutions and preferred embodiments
KHKKVKKRPQRATSNCFA

SEQ ID NO: 3359 - protein, 18 aa, Artificial Sequence
  Description of Artificial Sequence: Synthetic peptide
  N-term H or Acetyl
  MOD_RES (14)..(14): Ser or Phospho-Ser
  MOD_RES (16)..(16): Modified Cys
  See specification as filed for detailed description of substitutions and preferred embodiments
KHKKVKKRPQRATSNCFS

SEQ ID NO: 3360 - protein, 18 aa, Artificial Sequence
  Description of Artificial Sequence: Synthetic peptide
  N-term H or Acetyl
  MOD_RES (16)..(16): Modified Cys
  MOD_RES (18)..(18): Ser or Phospho-Ser
  See specification as filed for detailed description of substitutions and preferred embodiments
KHKKVKKRPQRATSDCFS

SEQ ID NO: 3361 - protein, 18 aa, Artificial Sequence
  Description of Artificial Sequence: Synthetic peptide
  N-term H or Acetyl
  MOD_RES (16)..(16): Modified Cys
  MOD_RES (18)..(18): Ser or Phospho-Ser
  See specification as filed for detailed description of substitutions and preferred embodiments
KHKKVKKRPQRATSNCFS

SEQ ID NO: 3362 - protein, 18 aa, Artificial Sequence
  Description of Artificial Sequence: Synthetic peptide
  N-term H or Acetyl
  MOD_RES (14)..(14): Ser or Phospho-Ser
  MOD_RES (16)..(16): Modified Cys
  See specification as filed for detailed description of substitutions and preferred embodiments
KHKTKKKRPQRADSDCFA

SEQ ID NO: 3363 - protein, 18 aa, Artificial Sequence
  Description of Artificial Sequence: Synthetic peptide
  N-term H or Acetyl
  MOD_RES (14)..(14): Ser or Phospho-Ser
  MOD_RES (16)..(16): Modified Cys
  See specification as filed for detailed description of substitutions and preferred embodiments
KHKTKKKRPQRADSDCFS

SEQ ID NO: 3364 - protein, 18 aa, Artificial Sequence
  Description of Artificial Sequence: Synthetic peptide
  N-term H or Acetyl
  MOD_RES (14)..(14): Ser or Phospho-Ser
  MOD_RES (16)..(16): Modified Cys
  See specification as filed for detailed description of substitutions and preferred embodiments
KHKTKKKRPQRADSNCFA

SEQ ID NO: 3365 - protein, 18 aa, Artificial Sequence
  Description of Artificial Sequence: Synthetic peptide
  N-term H or Acetyl
  MOD_RES (14)..(14): Ser or Phospho-Ser
  MOD_RES (16)..(16): Modified Cys
  See specification as filed for detailed description of substitutions and preferred embodiments
KHKTKKKRPQRADSNCFS

SEQ ID NO: 3366 - protein, 18 aa, Artificial Sequence
  Description of Artificial Sequence: Synthetic peptide
  N-term H or Acetyl
  MOD_RES (16)..(16): Modified Cys
  MOD_RES (18)..(18): Ser or Phospho-Ser
  See specification as filed for detailed description of substitutions and preferred embodiments
KHKTKKKRPQRADSDCFS

SEQ ID NO: 3367 - protein, 18 aa, Artificial Sequence
  Description of Artificial Sequence: Synthetic peptide
  N-term H or Acetyl
  MOD_RES (16)..(16): Modified Cys
  MOD_RES (18)..(18): Ser or Phospho-Ser
  See specification as filed for detailed description of substitutions and preferred embodiments
KHKTKKKRPQRADSNCFS

SEQ ID NO: 3368 - protein, 18 aa, Artificial Sequence
  Description of Artificial Sequence: Synthetic peptide
  N-term H or Acetyl
  MOD_RES (14)..(14): Ser or Phospho-Ser
  MOD_RES (16)..(16): Modified Cys
  See specification as filed for detailed description of substitutions and preferred embodiments
KHKTKKKRPQRAESDCFA

SEQ ID NO: 3369 - protein, 18 aa, Artificial Sequence
  Description of Artificial Sequence: Synthetic peptide
  N-term H or Acetyl
  MOD_RES (14)..(14): Ser or Phospho-Ser
  MOD_RES (16)..(16): Modified Cys
  See specification as filed for detailed description of substitutions and preferred embodiments
KHKTKKKRPQRAESDCFS

SEQ ID NO: 3370 - protein, 18 aa, Artificial Sequence
  Description of Artificial Sequence: Synthetic peptide
  N-term H or Acetyl
  MOD_RES (14)..(14): Ser or Phospho-Ser
  MOD_RES (16)..(16): Modified Cys
  See specification as filed for detailed description of substitutions and preferred embodiments
KHKTKKKRPQRAESNCFA

SEQ ID NO: 3371 - protein, 18 aa, Artificial Sequence
  Description of Artificial Sequence: Synthetic peptide
  N-term H or Acetyl
  MOD_RES (14)..(14): Ser or Phospho-Ser
  MOD_RES (16)..(16): Modified Cys
  See specification as filed for detailed description of substitutions and preferred embodiments
KHKTKKKRPQRAESNCFS

SEQ ID NO: 3372 - protein, 18 aa, Artificial Sequence
  Description of Artificial Sequence: Synthetic peptide
  N-term H or Acetyl
  MOD_RES (16)..(16): Modified Cys
  MOD_RES (18)..(18): Ser or Phospho-Ser
  See specification as filed for detailed description of substitutions and preferred embodiments
KHKTKKKRPQRAESDCFS

SEQ ID NO: 3373 - protein, 18 aa, Artificial Sequence
  Description of Artificial Sequence: Synthetic peptide
  N-term H or Acetyl
  MOD_RES (16)..(16): Modified Cys
  MOD_RES (18)..(18): Ser or Phospho-Ser
  See specification as filed for detailed description of substitutions and preferred embodiments
KHKTKKKRPQRAESNCFS

SEQ ID NO: 3374 - protein, 18 aa, Artificial Sequence
  Description of Artificial Sequence: Synthetic peptide
  N-term H or Acetyl
  MOD_RES (14)..(14): Ser or Phospho-Ser
  MOD_RES (16)..(16): Modified Cys
  See specification as filed for detailed description of substitutions and preferred embodiments
KHKTKKKRPQRAHSDCFA

SEQ ID NO: 3375 - protein, 18 aa, Artificial Sequence
  Description of Artificial Sequence: Synthetic peptide
  N-term H or Acetyl
  MOD_RES (14)..(14): Ser or Phospho-Ser
  MOD_RES (16)..(16): Modified Cys
  See specification as filed for detailed description of substitutions and preferred embodiments
KHKTKKKRPQRAHSDCFS

SEQ ID NO: 3376 - protein, 18 aa, Artificial Sequence
  Description of Artificial Sequence: Synthetic peptide
  N-term H or Acetyl
  MOD_RES (14)..(14): Ser or Phospho-Ser
  MOD_RES (16)..(16): Modified Cys
  See specification as filed for detailed description of substitutions and preferred embodiments
KHKTKKKRPQRAHSNCFA

SEQ ID NO: 3377 - protein, 18 aa, Artificial Sequence
  Description of Artificial Sequence: Synthetic peptide
  N-term H or Acetyl
  MOD_RES (14)..(14): Ser or Phospho-Ser
  MOD_RES (16)..(16): Modified Cys
  See specification as filed for detailed description of substitutions and preferred embodiments
KHKTKKKRPQRAHSNCFS

SEQ ID NO: 3378 - protein, 18 aa, Artificial Sequence
  Description of Artificial Sequence: Synthetic peptide
  N-term H or Acetyl
  MOD_RES (16)..(16): Modified Cys
  MOD_RES (18)..(18): Ser or Phospho-Ser
  See specification as filed for detailed description of substitutions and preferred embodiments
KHKTKKKRPQRAHSDCFS

SEQ ID NO: 3379 - protein, 18 aa, Artificial Sequence
  Description of Artificial Sequence: Synthetic peptide
  N-term H or Acetyl
  MOD_RES (16)..(16): Modified Cys
  MOD_RES (18)..(18): Ser or Phospho-Ser
  See specification as filed for detailed description of substitutions and preferred embodiments
KHKTKKKRPQRAHSNCFS

SEQ ID NO: 3380 - protein, 18 aa, Artificial Sequence
  Description of Artificial Sequence: Synthetic peptide
  N-term H or Acetyl
  MOD_RES (14)..(14): Ser or Phospho-Ser
  MOD_RES (16)..(16): Modified Cys
  See specification as filed for detailed description of substitutions and preferred embodiments
KHKTKKKRPQRATSDCFA

SEQ ID NO: 3381 - protein, 18 aa, Artificial Sequence
  Description of Artificial Sequence: Synthetic peptide
  N-term H or Acetyl
  MOD_RES (14)..(14): Ser or Phospho-Ser
  MOD_RES (16)..(16): Modified Cys
  See specification as filed for detailed description of substitutions and preferred embodiments
KHKTKKKRPQRATSDCFS

SEQ ID NO: 3382 - protein, 18 aa, Artificial Sequence
  Description of Artificial Sequence: Synthetic peptide
  N-term H or Acetyl
  MOD_RES (14)..(14): Ser or Phospho-Ser
  MOD_RES (16)..(16): Modified Cys
  See specification as filed for detailed description of substitutions and preferred embodiments
KHKTKKKRPQRATSNCFA

SEQ ID NO: 3383 - protein, 18 aa, Artificial Sequence
  Description of Artificial Sequence: Synthetic peptide
  N-term H or Acetyl
  MOD_RES (14)..(14): Ser or Phospho-Ser
  MOD_RES (16)..(16): Modified Cys
  See specification as filed for detailed description of substitutions and preferred embodiments
KHKTKKKRPQRATSNCFS

SEQ ID NO: 3384 - protein, 18 aa, Artificial Sequence
  Description of Artificial Sequence: Synthetic peptide
  N-term H or Acetyl
  MOD_RES (16)..(16): Modified Cys
  MOD_RES (18)..(18): Ser or Phospho-Ser
  See specification as filed for detailed description of substitutions and preferred embodiments
KHKTKKKRPQRATSDCFS

SEQ ID NO: 3385 - protein, 18 aa, Artificial Sequence
  Description of Artificial Sequence: Synthetic peptide
  N-term H or Acetyl
  MOD_RES (16)..(16): Modified Cys
  MOD_RES (18)..(18): Ser or Phospho-Ser
  See specification as filed for detailed description of substitutions and preferred embodiments
KHKTKKKRPQRATSNCFS

SEQ ID NO: 3386 - protein, 18 aa, Artificial Sequence
  Description of Artificial Sequence: Synthetic peptide
  N-term H or Acetyl
  MOD_RES (14)..(14): Ser or Phospho-Ser
  MOD_RES (16)..(16): Modified Cys
  See specification as filed for detailed description of substitutions and preferred embodiments
KHKTRKKRPQRADSDCFA

SEQ ID NO: 3387 - protein, 18 aa, Artificial Sequence
  Description of Artificial Sequence: Synthetic peptide
  N-term H or Acetyl
  MOD_RES (14)..(14): Ser or Phospho-Ser
  MOD_RES (16)..(16): Modified Cys
  See specification as filed for detailed description of substitutions and preferred embodiments
KHKTRKKRPQRADSDCFS

SEQ ID NO: 3388 - protein, 18 aa, Artificial Sequence
  Description of Artificial Sequence: Synthetic peptide
  N-term H or Acetyl
  MOD_RES (14)..(14): Ser or Phospho-Ser
  MOD_RES (16)..(16): Modified Cys
  See specification as filed for detailed description of substitutions and preferred embodiments
KHKTRKKRPQRADSNCFA

SEQ ID NO: 3389 - protein, 18 aa, Artificial Sequence
  Description of Artificial Sequence: Synthetic peptide
  N-term H or Acetyl
  MOD_RES (14)..(14): Ser or Phospho-Ser
  MOD_RES (16)..(16): Modified Cys
  See specification as filed for detailed description of substitutions and preferred embodiments
KHKTRKKRPQRADSNCFS

SEQ ID NO: 3390 - protein, 18 aa, Artificial Sequence
  Description of Artificial Sequence: Synthetic peptide
  N-term H or Acetyl
  MOD_RES (16)..(16): Modified Cys
  MOD_RES (18)..(18): Ser or Phospho-Ser
  See specification as filed for detailed description of substitutions and preferred embodiments
KHKTRKKRPQRADSDCFS

SEQ ID NO: 3391 - protein, 18 aa, Artificial Sequence
  Description of Artificial Sequence: Synthetic peptide
  N-term H or Acetyl
  MOD_RES (16)..(16): Modified Cys
  MOD_RES (18)..(18): Ser or Phospho-Ser
  See specification as filed for detailed description of substitutions and preferred embodiments
KHKTRKKRPQRADSNCFS

SEQ ID NO: 3392 - protein, 18 aa, Artificial Sequence
  Description of Artificial Sequence: Synthetic peptide
  N-term H or Acetyl
  MOD_RES (14)..(14): Ser or Phospho-Ser
  MOD_RES (16)..(16): Modified Cys
  See specification as filed for detailed description of substitutions and preferred embodiments
KHKTRKKRPQRAESDCFA

SEQ ID NO: 3393 - protein, 18 aa, Artificial Sequence
  Description of Artificial Sequence: Synthetic peptide
  N-term H or Acetyl
  MOD_RES (14)..(14): Ser or Phospho-Ser
  MOD_RES (16)..(16): Modified Cys
  See specification as filed for detailed description of substitutions and preferred embodiments
KHKTRKKRPQRAESDCFS

SEQ ID NO: 3394 - protein, 18 aa, Artificial Sequence
  Description of Artificial Sequence: Synthetic peptide
  N-term H or Acetyl
  MOD_RES (14)..(14): Ser or Phospho-Ser
  MOD_RES (16)..(16): Modified Cys
  See specification as filed for detailed description of substitutions and preferred embodiments
KHKTRKKRPQRAESNCFA

SEQ ID NO: 3395 - protein, 18 aa, Artificial Sequence
  Description of Artificial Sequence: Synthetic peptide
  N-term H or Acetyl
  MOD_RES (14)..(14): Ser or Phospho-Ser
  MOD_RES (16)..(16): Modified Cys
  See specification as filed for detailed description of substitutions and preferred embodiments
KHKTRKKRPQRAESNCFS

SEQ ID NO: 3396 - protein, 18 aa, Artificial Sequence
  Description of Artificial Sequence: Synthetic peptide
  N-term H or Acetyl
  MOD_RES (16)..(16): Modified Cys
  MOD_RES (18)..(18): Ser or Phospho-Ser
  See specification as filed for detailed description of substitutions and preferred embodiments
KHKTRKKRPQRAESDCFS

SEQ ID NO: 3397 - protein, 18 aa, Artificial Sequence
  Description of Artificial Sequence: Synthetic peptide
  N-term H or Acetyl
  MOD_RES (16)..(16): Modified Cys
  MOD_RES (18)..(18): Ser or Phospho-Ser
  See specification as filed for detailed description of substitutions and preferred embodiments
KHKTRKKRPQRAESNCFS

SEQ ID NO: 3398 - protein, 18 aa, Artificial Sequence
  Description of Artificial Sequence: Synthetic peptide
  N-term H or Acetyl
  MOD_RES (14)..(14): Ser or Phospho-Ser
  MOD_RES (16)..(16): Modified Cys
  See specification as filed for detailed description of substitutions and preferred embodiments
KHKTRKKRPQRAHSDCFA

SEQ ID NO: 3399 - protein, 18 aa, Artificial Sequence
  Description of Artificial Sequence: Synthetic peptide
  N-term H or Acetyl
  MOD_RES (14)..(14): Ser or Phospho-Ser
  MOD_RES (16)..(16): Modified Cys
  See specification as filed for detailed description of substitutions and preferred embodiments
KHKTRKKRPQRAHSDCFS

SEQ ID NO: 3400 - protein, 18 aa, Artificial Sequence
  Description of Artificial Sequence: Synthetic peptide
  N-term H or Acetyl
  MOD_RES (14)..(14): Ser or Phospho-Ser
  MOD_RES (16)..(16): Modified Cys
  See specification as filed for detailed description of substitutions and preferred embodiments
KHKTRKKRPQRAHSNCFA

SEQ ID NO: 3401 - protein, 18 aa, Artificial Sequence
  Description of Artificial Sequence: Synthetic peptide
  N-term H or Acetyl
  MOD_RES (14)..(14): Ser or Phospho-Ser
  MOD_RES (16)..(16): Modified Cys
  See specification as filed for detailed description of substitutions and preferred embodiments
KHKTRKKRPQRAHSNCFS

SEQ ID NO: 3402 - protein, 18 aa, Artificial Sequence
  Description of Artificial Sequence: Synthetic peptide
  N-term H or Acetyl
  MOD_RES (16)..(16): Modified Cys
  MOD_RES (18)..(18): Ser or Phospho-Ser
  See specification as filed for detailed description of substitutions and preferred embodiments
KHKTRKKRPQRAHSDCFS

SEQ ID NO: 3403 - protein, 18 aa, Artificial Sequence
  Description of Artificial Sequence: Synthetic peptide
  N-term H or Acetyl
  MOD_RES (16)..(16): Modified Cys
  MOD_RES (18)..(18): Ser or Phospho-Ser
  See specification as filed for detailed description of substitutions and preferred embodiments
KHKTRKKRPQRAHSNCFS

SEQ ID NO: 3404 - protein, 18 aa, Artificial Sequence
  Description of Artificial Sequence: Synthetic peptide
  N-term H or Acetyl
  MOD_RES (14)..(14): Ser or Phospho-Ser
  MOD_RES (16)..(16): Modified Cys
  See specification as filed for detailed description of substitutions and preferred embodiments
KHKTRKKRPQRATSDCFA

SEQ ID NO: 3405 - protein, 18 aa, Artificial Sequence
  Description of Artificial Sequence: Synthetic peptide
  N-term H or Acetyl
  MOD_RES (14)..(14): Ser or Phospho-Ser
  MOD_RES (16)..(16): Modified Cys
  See specification as filed for detailed description of substitutions and preferred embodiments
KHKTRKKRPQRATSDCFS

SEQ ID NO: 3406 - protein, 18 aa, Artificial Sequence
  Description of Artificial Sequence: Synthetic peptide
  N-term H or Acetyl
  MOD_RES (14)..(14): Ser or Phospho-Ser
  MOD_RES (16)..(16): Modified Cys
  See specification as filed for detailed description of substitutions and preferred embodiments
KHKTRKKRPQRATSNCFA

SEQ ID NO: 3407 - protein, 18 aa, Artificial Sequence
  Description of Artificial Sequence: Synthetic peptide
  N-term H or Acetyl
  MOD_RES (14)..(14): Ser or Phospho-Ser
  MOD_RES (16)..(16): Modified Cys
  See specification as filed for detailed description of substitutions and preferred embodiments
KHKTRKKRPQRATSNCFS

SEQ ID NO: 3408 - protein, 18 aa, Artificial Sequence
  Description of Artificial Sequence: Synthetic peptide
  N-term H or Acetyl
  MOD_RES (16)..(16): Modified Cys
  MOD_RES (18)..(18): Ser or Phospho-Ser
  See specification as filed for detailed description of substitutions and preferred embodiments
KHKTRKKRPQRATSDCFS

SEQ ID NO: 3409 - protein, 18 aa, Artificial Sequence
  Description of Artificial Sequence: Synthetic peptide
  N-term H or Acetyl
  MOD_RES (16)..(16): Modified Cys
  MOD_RES (18)..(18): Ser or Phospho-Ser
  See specification as filed for detailed description of substitutions and preferred embodiments
KHKTRKKRPQRATSNCFS

SEQ ID NO: 3410 - protein, 18 aa, Artificial Sequence
  Description of Artificial Sequence: Synthetic peptide
  N-term H or Acetyl
  MOD_RES (14)..(14): Ser or Phospho-Ser
  MOD_RES (16)..(16): Modified Cys
  See specification as filed for detailed description of substitutions and preferred embodiments
KHKTTKKRPQRADSDCFA

SEQ ID NO: 3411 - protein, 18 aa, Artificial Sequence
  Description of Artificial Sequence: Synthetic peptide
  N-term H or Acetyl
  MOD_RES (14)..(14): Ser or Phospho-Ser
  MOD_RES (16)..(16): Modified Cys
  See specification as filed for detailed description of substitutions and preferred embodiments
KHKTTKKRPQRADSDCFS

SEQ ID NO: 3412 - protein, 18 aa, Artificial Sequence
  Description of Artificial Sequence: Synthetic peptide
  N-term H or Acetyl
  MOD_RES (14)..(14): Ser or Phospho-Ser
  MOD_RES (16)..(16): Modified Cys
  See specification as filed for detailed description of substitutions and preferred embodiments
KHKTTKKRPQRADSNCFA

SEQ ID NO: 3413 - protein, 18 aa, Artificial Sequence
  Description of Artificial Sequence: Synthetic peptide
  N-term H or Acetyl
  MOD_RES (14)..(14): Ser or Phospho-Ser
  MOD_RES (16)..(16): Modified Cys
  See specification as filed for detailed description of substitutions and preferred embodiments
KHKTTKKRPQRADSNCFS

SEQ ID NO: 3414 - protein, 18 aa, Artificial Sequence
  Description of Artificial Sequence: Synthetic peptide
  N-term H or Acetyl
  MOD_RES (16)..(16): Modified Cys
  MOD_RES (18)..(18): Ser or Phospho-Ser
  See specification as filed for detailed description of substitutions and preferred embodiments
KHKTTKKRPQRADSDCFS

SEQ ID NO: 3415 - protein, 18 aa, Artificial Sequence
  Description of Artificial Sequence: Synthetic peptide
  N-term H or Acetyl
  MOD_RES (16)..(16): Modified Cys
  MOD_RES (18)..(18): Ser or Phospho-Ser
  See specification as filed for detailed description of substitutions and preferred embodiments
KHKTTKKRPQRADSNCFS

SEQ ID NO: 3416 - protein, 18 aa, Artificial Sequence
  Description of Artificial Sequence: Synthetic peptide
  N-term H or Acetyl
  MOD_RES (14)..(14): Ser or Phospho-Ser
  MOD_RES (16)..(16): Modified Cys
  See specification as filed for detailed description of substitutions and preferred embodiments
KHKTTKKRPQRAESDCFA

SEQ ID NO: 3417 - protein, 18 aa, Artificial Sequence
  Description of Artificial Sequence: Synthetic peptide
  N-term H or Acetyl
  MOD_RES (14)..(14): Ser or Phospho-Ser
  MOD_RES (16)..(16): Modified Cys
  See specification as filed for detailed description of substitutions and preferred embodiments
KHKTTKKRPQRAESDCFS

SEQ ID NO: 3418 - protein, 18 aa, Artificial Sequence
  Description of Artificial Sequence: Synthetic peptide
  N-term H or Acetyl
  MOD_RES (14)..(14): Ser or Phospho-Ser
  MOD_RES (16)..(16): Modified Cys
  See specification as filed for detailed description of substitutions and preferred embodiments
KHKTTKKRPQRAESNCFA

SEQ ID NO: 3419 - protein, 18 aa, Artificial Sequence
  Description of Artificial Sequence: Synthetic peptide
  N-term H or Acetyl
  MOD_RES (14)..(14): Ser or Phospho-Ser
  MOD_RES (16)..(16): Modified Cys
  See specification as filed for detailed description of substitutions and preferred embodiments
KHKTTKKRPQRAESNCFS

SEQ ID NO: 3420 - protein, 18 aa, Artificial Sequence
  Description of Artificial Sequence: Synthetic peptide
  N-term H or Acetyl
  MOD_RES (16)..(16): Modified Cys
  MOD_RES (18)..(18): Ser or Phospho-Ser
  See specification as filed for detailed description of substitutions and preferred embodiments
KHKTTKKRPQRAESDCFS

SEQ ID NO: 3421 - protein, 18 aa, Artificial Sequence
  Description of Artificial Sequence: Synthetic peptide
  N-term H or Acetyl
  MOD_RES (16)..(16): Modified Cys
  MOD_RES (18)..(18): Ser or Phospho-Ser
  See specification as filed for detailed description of substitutions and preferred embodiments
KHKTTKKRPQRAESNCFS

SEQ ID NO: 3422 - protein, 18 aa, Artificial Sequence
  Description of Artificial Sequence: Synthetic peptide
  N-term H or Acetyl
  MOD_RES (14)..(14): Ser or Phospho-Ser
  MOD_RES (16)..(16): Modified Cys
  See specification as filed for detailed description of substitutions and preferred embodiments
KHKTTKKRPQRAHSDCFA

SEQ ID NO: 3423 - protein, 18 aa, Artificial Sequence
  Description of Artificial Sequence: Synthetic peptide
  N-term H or Acetyl
  MOD_RES (14)..(14): Ser or Phospho-Ser
  MOD_RES (16)..(16): Modified Cys
  See specification as filed for detailed description of substitutions and preferred embodiments
KHKTTKKRPQRAHSDCFS

SEQ ID NO: 3424 - protein, 18 aa, Artificial Sequence
  Description of Artificial Sequence: Synthetic peptide
  N-term H or Acetyl
  MOD_RES (14)..(14): Ser or Phospho-Ser
  MOD_RES (16)..(16): Modified Cys
  See specification as filed for detailed description of substitutions and preferred embodiments
KHKTTKKRPQRAHSNCFA

SEQ ID NO: 3425 - protein, 18 aa, Artificial Sequence
  Description of Artificial Sequence: Synthetic peptide
  N-term H or Acetyl
  MOD_RES (14)..(14): Ser or Phospho-Ser
  MOD_RES (16)..(16): Modified Cys
  See specification as filed for detailed description of substitutions and preferred embodiments
KHKTTKKRPQRAHSNCFS

SEQ ID NO: 3426 - protein, 18 aa, Artificial Sequence
  Description of Artificial Sequence: Synthetic peptide
  N-term H or Acetyl
  MOD_RES (16)..(16): Modified Cys
  MOD_RES (18)..(18): Ser or Phospho-Ser
  See specification as filed for detailed description of substitutions and preferred embodiments
KHKTTKKRPQRAHSDCFS

SEQ ID NO: 3427 - protein, 18 aa, Artificial Sequence
  Description of Artificial Sequence: Synthetic peptide
  N-term H or Acetyl
  MOD_RES (16)..(16): Modified Cys
  MOD_RES (18)..(18): Ser or Phospho-Ser
  See specification as filed for detailed description of substitutions and preferred embodiments
KHKTTKKRPQRAHSNCFS

SEQ ID NO: 3428 - protein, 18 aa, Artificial Sequence
  Description of Artificial Sequence: Synthetic peptide
  N-term H or Acetyl
  MOD_RES (14)..(14): Ser or Phospho-Ser
  MOD_RES (16)..(16): Modified Cys
  See specification as filed for detailed description of substitutions and preferred embodiments
KHKTTKKRPQRATSDCFA

SEQ ID NO: 3429 - protein, 18 aa, Artificial Sequence
  Description of Artificial Sequence: Synthetic peptide
  N-term H or Acetyl
  MOD_RES (14)..(14): Ser or Phospho-Ser
  MOD_RES (16)..(16): Modified Cys
  See specification as filed for detailed description of substitutions and preferred embodiments
KHKTTKKRPQRATSDCFS

SEQ ID NO: 3430 - protein, 18 aa, Artificial Sequence
  Description of Artificial Sequence: Synthetic peptide
  N-term H or Acetyl
  MOD_RES (14)..(14): Ser or Phospho-Ser
  MOD_RES (16)..(16): Modified Cys
  See specification as filed for detailed description of substitutions and preferred embodiments
KHKTTKKRPQRATSNCFA

SEQ ID NO: 3431 - protein, 18 aa, Artificial Sequence
  Description of Artificial Sequence: Synthetic peptide
  N-term H or Acetyl
  MOD_RES (14)..(14): Ser or Phospho-Ser
  MOD_RES (16)..(16): Modified Cys
  See specification as filed for detailed description of substitutions and preferred embodiments
KHKTTKKRPQRATSNCFS

SEQ ID NO: 3432 - protein, 18 aa, Artificial Sequence
  Description of Artificial Sequence: Synthetic peptide
  N-term H or Acetyl
  MOD_RES (16)..(16): Modified Cys
  MOD_RES (18)..(18): Ser or Phospho-Ser
  See specification as filed for detailed description of substitutions and preferred embodiments
KHKTTKKRPQRATSDCFS

SEQ ID NO: 3433 - protein, 18 aa, Artificial Sequence
  Description of Artificial Sequence: Synthetic peptide
  N-term H or Acetyl
  MOD_RES (16)..(16): Modified Cys
  MOD_RES (18)..(18): Ser or Phospho-Ser
  See specification as filed for detailed description of substitutions and preferred embodiments
KHKTTKKRPQRATSNCFS

SEQ ID NO: 3434 - protein, 18 aa, Artificial Sequence
  Description of Artificial Sequence: Synthetic peptide
  N-term H or Acetyl
  MOD_RES (14)..(14): Ser or Phospho-Ser
  MOD_RES (16)..(16): Modified Cys
  See specification as filed for detailed description of substitutions and preferred embodiments
KHKTVKKRPQRADSDCFA

SEQ ID NO: 3435 - protein, 18 aa, Artificial Sequence
  Description of Artificial Sequence: Synthetic peptide
  N-term H or Acetyl
  MOD_RES (14)..(14): Ser or Phospho-Ser
  MOD_RES (16)..(16): Modified Cys
  See specification as filed for detailed description of substitutions and preferred embodiments
KHKTVKKRPQRADSDCFS

SEQ ID NO: 3436 - protein, 18 aa, Artificial Sequence
  Description of Artificial Sequence: Synthetic peptide
  N-term H or Acetyl
  MOD_RES (14)..(14): Ser or Phospho-Ser
  MOD_RES (16)..(16): Modified Cys
  See specification as filed for detailed description of substitutions and preferred embodiments
KHKTVKKRPQRADSNCFA

SEQ ID NO: 3437 - protein, 18 aa, Artificial Sequence
  Description of Artificial Sequence: Synthetic peptide
  N-term H or Acetyl
  MOD_RES (14)..(14): Ser or Phospho-Ser
  MOD_RES (16)..(16): Modified Cys
  See specification as filed for detailed description of substitutions and preferred embodiments
KHKTVKKRPQRADSNCFS

SEQ ID NO: 3438 - protein, 18 aa, Artificial Sequence
  Description of Artificial Sequence: Synthetic peptide
  N-term H or Acetyl
  MOD_RES (16)..(16): Modified Cys
  MOD_RES (18)..(18): Ser or Phospho-Ser
  See specification as filed for detailed description of substitutions and preferred embodiments
KHKTVKKRPQRADSDCFS

SEQ ID NO: 3439 - protein, 18 aa, Artificial Sequence
  Description of Artificial Sequence: Synthetic peptide
  N-term H or Acetyl
  MOD_RES (16)..(16): Modified Cys
  MOD_RES (18)..(18): Ser or Phospho-Ser
  See specification as filed for detailed description of substitutions and preferred embodiments
KHKTVKKRPQRADSNCFS

SEQ ID NO: 3440 - protein, 18 aa, Artificial Sequence
  Description of Artificial Sequence: Synthetic peptide
  N-term H or Acetyl
  MOD_RES (14)..(14): Ser or Phospho-Ser
  MOD_RES (16)..(16): Modified Cys
  See specification as filed for detailed description of substitutions and preferred embodiments
KHKTVKKRPQRAESDCFA

SEQ ID NO: 3441 - protein, 18 aa, Artificial Sequence
  Description of Artificial Sequence: Synthetic peptide
  N-term H or Acetyl
  MOD_RES (14)..(14): Ser or Phospho-Ser
  MOD_RES (16)..(16): Modified Cys
  See specification as filed for detailed description of substitutions and preferred embodiments
KHKTVKKRPQRAESDCFS

SEQ ID NO: 3442 - protein, 18 aa, Artificial Sequence
  Description of Artificial Sequence: Synthetic peptide
  N-term H or Acetyl
  MOD_RES (14)..(14): Ser or Phospho-Ser
  MOD_RES (16)..(16): Modified Cys
  See specification as filed for detailed description of substitutions and preferred embodiments
KHKTVKKRPQRAESNCFA

SEQ ID NO: 3443 - protein, 18 aa, Artificial Sequence
  Description of Artificial Sequence: Synthetic peptide
  N-term H or Acetyl
  MOD_RES (14)..(14): Ser or Phospho-Ser
  MOD_RES (16)..(16): Modified Cys
  See specification as filed for detailed description of substitutions and preferred embodiments
KHKTVKKRPQRAESNCFS

SEQ ID NO: 3444 - protein, 18 aa, Artificial Sequence
  Description of Artificial Sequence: Synthetic peptide
  N-term H or Acetyl
  MOD_RES (16)..(16): Modified Cys
  MOD_RES (18)..(18): Ser or Phospho-Ser
  See specification as filed for detailed description of substitutions and preferred embodiments
KHKTVKKRPQRAESDCFS

SEQ ID NO: 3445 - protein, 18 aa, Artificial Sequence
  Description of Artificial Sequence: Synthetic peptide
  N-term H or Acetyl
  MOD_RES (16)..(16): Modified Cys
  MOD_RES (18)..(18): Ser or Phospho-Ser
  See specification as filed for detailed description of substitutions and preferred embodiments
KHKTVKKRPQRAESNCFS

SEQ ID NO: 3446 - protein, 18 aa, Artificial Sequence
  Description of Artificial Sequence: Synthetic peptide
  N-term H or Acetyl
  MOD_RES (14)..(14): Ser or Phospho-Ser
  MOD_RES (16)..(16): Modified Cys
  See specification as filed for detailed description of substitutions and preferred embodiments
KHKTVKKRPQRAHSDCFA

SEQ ID NO: 3447 - protein, 18 aa, Artificial Sequence
  Description of Artificial Sequence: Synthetic peptide
  N-term H or Acetyl
  MOD_RES (14)..(14): Ser or Phospho-Ser
  MOD_RES (16)..(16): Modified Cys
  See specification as filed for detailed description of substitutions and preferred embodiments
KHKTVKKRPQRAHSDCFS

SEQ ID NO: 3448 - protein, 18 aa, Artificial Sequence
  Description of Artificial Sequence: Synthetic peptide
  N-term H or Acetyl
  MOD_RES (14)..(14): Ser or Phospho-Ser
  MOD_RES (16)..(16): Modified Cys
  See specification as filed for detailed description of substitutions and preferred embodiments
KHKTVKKRPQRAHSNCFA

SEQ ID NO: 3449 - protein, 18 aa, Artificial Sequence
  Description of Artificial Sequence: Synthetic peptide
  N-term H or Acetyl
  MOD_RES (14)..(14): Ser or Phospho-Ser
  MOD_RES (16)..(16): Modified Cys
  See specification as filed for detailed description of substitutions and preferred embodiments
KHKTVKKRPQRAHSNCFS

SEQ ID NO: 3450 - protein, 18 aa, Artificial Sequence
  Description of Artificial Sequence: Synthetic peptide
  N-term H or Acetyl
  MOD_RES (16)..(16): Modified Cys
  MOD_RES (18)..(18): Ser or Phospho-Ser
  See specification as filed for detailed description of substitutions and preferred embodiments
KHKTVKKRPQRAHSDCFS

SEQ ID NO: 3451 - protein, 18 aa, Artificial Sequence
  Description of Artificial Sequence: Synthetic peptide
  N-term H or Acetyl
  MOD_RES (16)..(16): Modified Cys
  MOD_RES (18)..(18): Ser or Phospho-Ser
  See specification as filed for detailed description of substitutions and preferred embodiments
KHKTVKKRPQRAHSNCFS

SEQ ID NO: 3452 - protein, 18 aa, Artificial Sequence
  Description of Artificial Sequence: Synthetic peptide
  N-term H or Acetyl
  MOD_RES (14)..(14): Ser or Phospho-Ser
  MOD_RES (16)..(16): Modified Cys
  See specification as filed for detailed description of substitutions and preferred embodiments
KHKTVKKRPQRATSDCFA

SEQ ID NO: 3453 - protein, 18 aa, Artificial Sequence
  Description of Artificial Sequence: Synthetic peptide
  N-term H or Acetyl
  MOD_RES (14)..(14): Ser or Phospho-Ser
  MOD_RES (16)..(16): Modified Cys
  See specification as filed for detailed description of substitutions and preferred embodiments
KHKTVKKRPQRATSDCFS

SEQ ID NO: 3454 - protein, 18 aa, Artificial Sequence
  Description of Artificial Sequence: Synthetic peptide
  N-term H or Acetyl
  MOD_RES (14)..(14): Ser or Phospho-Ser
  MOD_RES (16)..(16): Modified Cys
  See specification as filed for detailed description of substitutions and preferred embodiments
KHKTVKKRPQRATSNCFA

SEQ ID NO: 3455 - protein, 18 aa, Artificial Sequence
  Description of Artificial Sequence: Synthetic peptide
  N-term H or Acetyl
  MOD_RES (14)..(14): Ser or Phospho-Ser
  MOD_RES (16)..(16): Modified Cys
  See specification as filed for detailed description of substitutions and preferred embodiments
KHKTVKKRPQRATSNCFS

SEQ ID NO: 3456 - protein, 18 aa, Artificial Sequence
  Description of Artificial Sequence: Synthetic peptide
  N-term H or Acetyl
  MOD_RES (16)..(16): Modified Cys
  MOD_RES (18)..(18): Ser or Phospho-Ser
  See specification as filed for detailed description of substitutions and preferred embodiments
KHKTVKKRPQRATSDCFS

SEQ ID NO: 3457 - protein, 18 aa, Artificial Sequence
  Description of Artificial Sequence: Synthetic peptide
  N-term H or Acetyl
  MOD_RES (16)..(16): Modified Cys
  MOD_RES (18)..(18): Ser or Phospho-Ser
  See specification as filed for detailed description of substitutions and preferred embodiments
KHKTVKKRPQRATSNCFS

SEQ ID NO: 3458 - protein, 15 aa, Artificial Sequence
  Description of Artificial Sequence: Synthetic peptide
  N-term H or Acetyl
  MOD_RES (8)..(8): Thr or Phospho-Thr
  MOD_RES (10)..(10): Modified Cys
  See specification as filed for detailed description of substitutions and preferred embodiments
KHRPQRATSCVFAMF

SEQ ID NO: 3459 - protein, 18 aa, Artificial Sequence
  Description of Artificial Sequence: Synthetic peptide
  N-term H or Acetyl
  MOD_RES (14)..(14): Ser or Phospho-Ser
  MOD_RES (16)..(16): Modified Cys
  See specification as filed for detailed description of substitutions and preferred embodiments
KIKTTKKRPQRATSNCFS

SEQ ID NO: 3460 - protein, 18 aa, Artificial Sequence
  Description of Artificial Sequence: Synthetic peptide
  N-term H or Acetyl
  MOD_RES (16)..(16): Modified Cys
  MOD_RES (18)..(18): Ser or Phospho-Ser
  See specification as filed for detailed description of substitutions and preferred embodiments
KIKTTKKRPQRATSNCFS

SEQ ID NO: 3461 - protein, 15 aa, Artificial Sequence
  Description of Artificial Sequence: Synthetic peptide
  N-term H or Acetyl
  MOD_RES (8)..(8): Thr or Phospho-Thr
  MOD_RES (10)..(10): Modified Cys
  See specification as filed for detailed description of substitutions and preferred embodiments
KIRPQRATSCVFAMF

SEQ ID NO: 3462 - protein, 15 aa, Artificial Sequence
  Description of Artificial Sequence: Synthetic peptide
  N-term H or Acetyl
  MOD_RES (3)..(3): Leu or Nle (i.e. isomer of Leucine)
  MOD_RES (8)..(8): Thr or Phospho-Thr
  MOD_RES (10)..(10): Modified Cys
  See specification as filed for detailed description of substitutions and preferred embodiments
KKLPQRATSCVFAMF

SEQ ID NO: 3463 - protein, 8 aa, Artificial Sequence
  Description of Artificial Sequence: Synthetic peptide
  N-term H or Acetyl
  MOD_RES (3)..(3): Modified Cys
  MOD_RES (5)..(5): Ser or Phospho-Ser
  See specification as filed for detailed description of substitutions and preferred embodiments
KKCASFKK

SEQ ID NO: 3464 - protein, 8 aa, Artificial Sequence
  Description of Artificial Sequence: Synthetic peptide
  N-term H or Acetyl
  MOD_RES (3)..(3): Modified Cys
  MOD_RES (5)..(5): Ser or Phospho-Ser
  See specification as filed for detailed description of substitutions and preferred embodiments
KKCASFRR

SEQ ID NO: 3465 - protein, 33 aa, Artificial Sequence; identical to SEQ ID NO: 1053
  Description of Artificial Sequence: Synthetic polypeptide
  N-term H or Acetyl
  MOD_RES (15)..(15): Ser or Phospho-Ser
  MOD_RES (17)..(17): Modified Cys
  See specification as filed for detailed description of substitutions and preferred embodiments

SEQ ID NO: 3466 - protein, 33 aa, Artificial Sequence; identical to SEQ ID NO: 1053
  Description of Artificial Sequence: Synthetic polypeptide
  N-term H or Acetyl
  MOD_RES (17)..(17): Modified Cys
  MOD_RES (19)..(19): Ser or Phospho-Ser
  See specification as filed for detailed description of substitutions and preferred embodiments

SEQ ID NO: 3467 - protein, 25 aa, Artificial Sequence
  Description of Artificial Sequence: Synthetic peptide
  N-term H or Acetyl
  MOD_RES (11)..(11): Ser or Phospho-Ser
  MOD_RES (13)..(13): Modified Cys
  See specification as filed for detailed description of substitutions and preferred embodiments
KKCVSGQLIDSMCNSFVGTRSYCKK

SEQ ID NO: 3468 - protein, 25 aa, Artificial Sequence
  Description of Artificial Sequence: Synthetic peptide
  N-term H or Acetyl
  MOD_RES (13)..(13): Modified Cys
  MOD_RES (15)..(15): Ser or Phospho-Ser
  See specification as filed for detailed description of substitutions and preferred embodiments
KKCVSGQLIDSMCNSFVGTRSYCKK

SEQ ID NO: 3469 - protein, 15 aa, Artificial Sequence
  Description of Artificial Sequence: Synthetic peptide
  N-term H or Acetyl
  MOD_RES (8)..(8): Thr or Phospho-Thr
  MOD_RES (10)..(10): Modified Cys
  See specification as filed for detailed description of substitutions and preferred embodiments
KKDPQRATSCVFAMF

SEQ ID NO: 3470 - protein, 15 aa, Artificial Sequence
  Description of Artificial Sequence: Synthetic peptide
  N-term H or Acetyl
  MOD_RES (8)..(8): Thr or Phospho-Thr
  MOD_RES (10)..(10): Modified Cys
  See specification as filed for detailed description of substitutions and preferred embodiments
KKEPQRATSCVFAMF

SEQ ID NO: 3471 - protein, 21 aa, Artificial Sequence
  Description of Artificial Sequence: Synthetic peptide
  N-term H or Acetyl
  MOD_RES (12)..(12): Ser or Phospho-Ser
  MOD_RES (14)..(14): Modified Cys
  See specification as filed for detailed description of substitutions and preferred embodiments
KKERLLDDRHDSGCDSMKDEE

SEQ ID NO: 3472 - protein, 21 aa, Artificial Sequence
  Description of Artificial Sequence: Synthetic peptide
  N-term H or Acetyl
  MOD_RES (14)..(14): Modified Cys
  MOD_RES (16)..(16): Ser or Phospho-Ser
  See specification as filed for detailed description of substitutions and preferred embodiments
KKERLLDDRHDSGCDSMKDEE

SEQ ID NO: 3473 - protein, 21 aa, Artificial Sequence
  Description of Artificial Sequence: Synthetic peptide
  N-term H or Acetyl
  MOD_RES (16)..(16): Ser or Phospho-Ser
  MOD_RES (18)..(18): Modified Cys
  See specification as filed for detailed description of substitutions and preferred embodiments
KKERLLDDRHDSGLDSMCDEE

SEQ ID NO: 3474 - protein, 15 aa, Artificial Sequence
  Description of Artificial Sequence: Synthetic peptide
  N-term H or Acetyl
  MOD_RES (8)..(8): Thr or Phospho-Thr
  MOD_RES (10)..(10): Modified Cys
  See specification as filed for detailed description of substitutions and preferred embodiments
KKFPQRATSCVFAMF

SEQ ID NO: 3475 - protein, 15 aa, Artificial Sequence
  Description of Artificial Sequence: Synthetic peptide
  N-term H or Acetyl
  MOD_RES (8)..(8): Thr or Phospho-Thr
  MOD_RES (10)..(10): Modified Cys
  See specification as filed for detailed description of substitutions and preferred embodiments
KKGPQRATSCVFAMF

SEQ ID NO: 3476 - protein, 15 aa, Artificial Sequence
  Description of Artificial Sequence: Synthetic peptide
  N-term H or Acetyl
  MOD_RES (8)..(8): Thr or Phospho-Thr
  MOD_RES (10)..(10): Modified Cys
  See specification as filed for detailed description of substitutions and preferred embodiments
KKHPQRATSCVFAMF

SEQ ID NO: 3477 - protein, 15 aa, Artificial Sequence
  Description of Artificial Sequence: Synthetic peptide
  N-term H or Acetyl
  MOD_RES (8)..(8): Thr or Phospho-Thr
  MOD_RES (10)..(10): Modified Cys
  See specification as filed for detailed description of substitutions and preferred embodiments
KKIPQRATSCVFAMF

SEQ ID NO: 3478 - protein, 14 aa, Artificial Sequence
  Description of Artificial Sequence: Synthetic peptide
  N-term H or Acetyl
  MOD_RES (4)..(4): Ser or Phospho-Ser
  MOD_RES (6)..(6): Modified Cys
  MOD_RES (11)..(11): Leu or Nle (i.e. isomer of Leucine)
  See specification as filed for detailed description of substitutions and preferred embodiments
KKISGCLSPILTEQ

SEQ ID NO: 3479 - protein, 14 aa, Artificial Sequence
  Description of Artificial Sequence: Synthetic peptide
  N-term H or Acetyl
  MOD_RES (6)..(6): Modified Cys
  MOD_RES (8)..(8): Ser or Phospho-Ser
  MOD_RES (11)..(11): Leu or Nle (i.e. isomer of Leucine)
  See specification as filed for detailed description of substitutions and preferred embodiments
KKISGCLSPILTEQ

SEQ ID NO: 3480 - protein, 14 aa, Artificial Sequence
  Description of Artificial Sequence: Synthetic peptide
  N-term H or Acetyl
  MOD_RES (8)..(8): Ser or Phospho-Ser
  MOD_RES (10)..(10): Modified Cys
  MOD_RES (11)..(11): Leu or Nle (i.e. isomer of Leucine)
  See specification as filed for detailed description of substitutions and preferred embodiments
KKISGRLSPCLTEQ

SEQ ID NO: 3481 - protein, 14 aa, Artificial Sequence
  Description of Artificial Sequence: Synthetic peptide
  N-term H or Acetyl
  MOD_RES (10)..(10): Modified Cys
  MOD_RES (11)..(11): Leu or Nle (i.e. isomer of Leucine)
  MOD_RES (12)..(12): Thr or Phospho-Thr
  See specification as filed for detailed description of substitutions and preferred embodiments
KKISGRLSPCLTEQ

SEQ ID NO: 3482 - protein, 16 aa, Artificial Sequence
  Description of Artificial Sequence: Synthetic peptide
  N-term H or Acetyl
  MOD_RES (11)..(11): Ser or Phospho-Ser
  MOD_RES (13)..(13): Modified Cys
  See specification as filed for detailed description of substitutions and preferred embodiments
KKKADKQFLISPCASP

SEQ ID NO: 3483 - protein, 16 aa, Artificial Sequence
  Description of Artificial Sequence: Synthetic peptide
  N-term H or Acetyl
  MOD_RES (13)..(13): Modified Cys
  MOD_RES (15)..(15): Ser or Phospho-Ser
  See specification as filed for detailed description of substitutions and preferred embodiments
KKKADKQFLISPCASP

SEQ ID NO: 3484 - protein, 15 aa, Artificial Sequence
  Description of Artificial Sequence: Synthetic peptide
  N-term H or Acetyl
  MOD_RES (13)..(13): Modified Cys
  MOD_RES (15)..(15): Ser or Phospho-Ser
  See specification as filed for detailed description of substitutions and preferred embodiments
KKKAEPLPPSYVCAS

SEQ ID NO: 3485 - protein, 17 aa, Artificial Sequence
  Description of Artificial Sequence: Synthetic peptide
  N-term H or Acetyl
  MOD_RES (9)..(9): Leu or Nle (i.e. isomer of Leucine)
  MOD_RES (10)..(10): Leu or Nle (i.e. isomer of Leucine)
  MOD_RES (11)..(11): Thr or Phospho-Thr
  MOD_RES (13)..(13): Modified Cys
  See specification as filed for detailed description of substitutions and preferred embodiments
KKKAGTSFLLTPCVVTR

SEQ ID NO: 3486 - protein, 18 aa, Artificial Sequence
  Description of Artificial Sequence: Synthetic peptide
  N-term H or Acetyl
  MOD_RES (11)..(11): Ser or Phospho-Ser
  MOD_RES (13)..(13): Modified Cys
  See specification as filed for detailed description of substitutions and preferred embodiments
KKKANPSPPPSPCQQINL

SEQ ID NO: 3487 - protein, 19 aa, Artificial Sequence
  Description of Artificial Sequence: Synthetic peptide
  N-term H or Acetyl
  MOD_RES (12)..(12): Ser or Phospho-Ser
  MOD_RES (14)..(14): Modified Cys
  See specification as filed for detailed description of substitutions and preferred embodiments
KKKAPLSTWSGSPCYAAPE

SEQ ID NO: 3488 - protein, 18 aa, Artificial Sequence
  Description of Artificial Sequence: Synthetic peptide
  N-term H or Acetyl
  MOD_RES (7)..(7): Leu or Nle (i.e. isomer of Leucine)
  MOD_RES (11)..(11): Ser or Phospho-Ser
  MOD_RES (13)..(13): Modified Cys
  See specification as filed for detailed description of substitutions and preferred embodiments
KKKDGRLVQLSPCALAAP

SEQ ID NO: 3489 - protein, 18 aa, Artificial Sequence
  Description of Artificial Sequence: Synthetic peptide
  N-term H or Acetyl
  MOD_RES (11)..(11): Thr or Phospho-Thr
  MOD_RES (13)..(13): Modified Cys
  MOD_RES (15)..(15): Leu or Nle (i.e. isomer of Leucine)
  See specification as filed for detailed description of substitutions and preferred embodiments
KKKFQGQLLGTICFLAPE

SEQ ID NO: 3490 - protein, 18 aa, Artificial Sequence
  Description of Artificial Sequence: Synthetic peptide
  N-term H or Acetyl
  MOD_RES (11)..(11): Thr or Phospho-Thr
  MOD_RES (13)..(13): Modified Cys
  See specification as filed for detailed description of substitutions and preferred embodiments
KKKGDNVLINTYCGVLKI

SEQ ID NO: 3491 - protein, 16 aa, Artificial Sequence
  Description of Artificial Sequence: Synthetic peptide
  N-term H or Acetyl
  MOD_RES (11)..(11): Thr or Phospho-Thr
  MOD_RES (13)..(13): Modified Cys
  See specification as filed for detailed description of substitutions and preferred embodiments
KKKGHITTTPTPCQFL

SEQ ID NO: 3492 - protein, 18 aa, Artificial Sequence
  Description of Artificial Sequence: Synthetic peptide
  N-term H or Acetyl
  MOD_RES (11)..(11): Thr or Phospho-Thr
  MOD_RES (13)..(13): Modified Cys
  See specification as filed for detailed description of substitutions and preferred embodiments
KKKGINPSTETFCGTLQY

SEQ ID NO: 3493 - protein, 18 aa, Artificial Sequence
  Description of Artificial Sequence: Synthetic peptide
  N-term H or Acetyl
  MOD_RES (13)..(13): Modified Cys
  MOD_RES (15)..(15): Thr or Phospho-Thr
  See specification as filed for detailed description of substitutions and preferred embodiments
KKKGINPSTETFCGTLQY

SEQ ID NO: 3494 - protein, 15 aa, Artificial Sequence
  Description of Artificial Sequence: Synthetic peptide
  N-term H or Acetyl
  MOD_RES (10)..(10): Ser or Phospho-Ser
  MOD_RES (12)..(12): Modified Cys
  See specification as filed for detailed description of substitutions and preferred embodiments
KKKGNLLPMSPCEFD

SEQ ID NO: 3495 - protein, 18 aa, Artificial Sequence
  Description of Artificial Sequence: Synthetic peptide
  N-term H or Acetyl
  MOD_RES (11)..(11): Thr or Phospho-Thr
  MOD_RES (13)..(13): Modified Cys
  See specification as filed for detailed description of substitutions and preferred embodiments
KKKGQSSAAATPCTTGTK

SEQ ID NO: 3496 - protein, 18 aa, Artificial Sequence
  Description of Artificial Sequence: Synthetic peptide
  N-term H or Acetyl
  MOD_RES (12)..(12): Ser or Phospho-Ser
  MOD_RES (14)..(14): Modified Cys
  See specification as filed for detailed description of substitutions and preferred embodiments
KKKGTQREGVSSLCSSSL

SEQ ID NO: 3497 - protein, 18 aa, Artificial Sequence
  Description of Artificial Sequence: Synthetic peptide
  N-term H or Acetyl
  MOD_RES (14)..(14): Modified Cys
  MOD_RES (16)..(16): Ser or Phospho-Ser
  See specification as filed for detailed description of substitutions and preferred embodiments
KKKGTQREGVSSLCSSSL

SEQ ID NO: 3498 - protein, 18 aa, Artificial Sequence
  Description of Artificial Sequence: Synthetic peptide
  N-term H or Acetyl
  MOD_RES (11)..(11): Thr or Phospho-Thr
  MOD_RES (13)..(13): Modified Cys
  See specification as filed for detailed description of substitutions and preferred embodiments
KKKGVITTTPTPCGQYFY

SEQ ID NO: 3499 - protein, 18 aa, Artificial Sequence
  Description of Artificial Sequence: Synthetic peptide
  N-term H or Acetyl
  MOD_RES (11)..(11): Ser or Phospho-Ser
  MOD_RES (13)..(13): Modified Cys
  See specification as filed for detailed description of substitutions and preferred embodiments
KKKHQLFRGFSFCAITSD

SEQ ID NO: 3500 - protein, 18 aa, Artificial Sequence
  Description of Artificial Sequence: Synthetic peptide
  N-term H or Acetyl
  MOD_RES (11)..(11): Ser or Phospho-Ser
  MOD_RES (13)..(13): Modified Cys
  See specification as filed for detailed description of substitutions and preferred embodiments
KKKIHFWSSLSPCAPLSP

SEQ ID NO: 3501 - protein, 18 aa, Artificial Sequence
  Description of Artificial Sequence: Synthetic peptide
  N-term H or Acetyl
  MOD_RES (14)..(14): Ser or Phospho-Ser
  MOD_RES (16)..(16): Modified Cys
  See specification as filed for detailed description of substitutions and preferred embodiments
KKKKKKKRPQRADSDCFA

SEQ ID NO: 3502 - protein, 18 aa, Artificial Sequence
  Description of Artificial Sequence: Synthetic peptide
  N-term H or Acetyl
  MOD_RES (14)..(14): Ser or Phospho-Ser
  MOD_RES (16)..(16): Modified Cys
  See specification as filed for detailed description of substitutions and preferred embodiments
KKKKKKKRPQRADSDCFS

SEQ ID NO: 3503 - protein, 18 aa, Artificial Sequence
  Description of Artificial Sequence: Synthetic peptide
  N-term H or Acetyl
  MOD_RES (14)..(14): Ser or Phospho-Ser
  MOD_RES (16)..(16): Modified Cys
  See specification as filed for detailed description of substitutions and preferred embodiments
KKKKKKKRPQRADSNCFA

SEQ ID NO: 3504 - protein, 18 aa, Artificial Sequence
  Description of Artificial Sequence: Synthetic peptide
  N-term H or Acetyl
  MOD_RES (14)..(14): Ser or Phospho-Ser
  MOD_RES (16)..(16): Modified Cys
  See specification as filed for detailed description of substitutions and preferred embodiments
KKKKKKKRPQRADSNCFS

SEQ ID NO: 3505 - protein, 18 aa, Artificial Sequence
  Description of Artificial Sequence: Synthetic peptide
  N-term H or Acetyl
  MOD_RES (16)..(16): Modified Cys
  MOD_RES (18)..(18): Ser or Phospho-Ser
  See specification as filed for detailed description of substitutions and preferred embodiments
KKKKKKKRPQRADSDCFS

SEQ ID NO: 3506 - protein, 18 aa, Artificial Sequence
  Description of Artificial Sequence: Synthetic peptide
  N-term H or Acetyl
  MOD_RES (16)..(16): Modified Cys
  MOD_RES (18)..(18): Ser or Phospho-Ser
  See specification as filed for detailed description of substitutions and preferred embodiments
KKKKKKKRPQRADSNCFS

SEQ ID NO: 3507 - protein, 18 aa, Artificial Sequence
  Description of Artificial Sequence: Synthetic peptide
  N-term H or Acetyl
  MOD_RES (14)..(14): Ser or Phospho-Ser
  MOD_RES (16)..(16): Modified Cys
  See specification as filed for detailed description of substitutions and preferred embodiments
KKKKKKKRPQRAESDCFA

SEQ ID NO: 3508 - protein, 18 aa, Artificial Sequence
  Description of Artificial Sequence: Synthetic peptide
  N-term H or Acetyl
  MOD_RES (14)..(14): Ser or Phospho-Ser
  MOD_RES (16)..(16): Modified Cys
  See specification as filed for detailed description of substitutions and preferred embodiments
KKKKKKKRPQRAESDCFS

SEQ ID NO: 3509 - protein, 18 aa, Artificial Sequence
  Description of Artificial Sequence: Synthetic peptide
  N-term H or Acetyl
  MOD_RES (14)..(14): Ser or Phospho-Ser
  MOD_RES (16)..(16): Modified Cys
  See specification as filed for detailed description of substitutions and preferred embodiments
KKKKKKKRPQRAESNCFA

SEQ ID NO: 3510 - protein, 18 aa, Artificial Sequence
  Description of Artificial Sequence: Synthetic peptide
  N-term H or Acetyl
  MOD_RES (14)..(14): Ser or Phospho-Ser
  MOD_RES (16)..(16): Modified Cys
  See specification as filed for detailed description of substitutions and preferred embodiments
KKKKKKKRPQRAESNCFS

SEQ ID NO: 3511 - protein, 18 aa, Artificial Sequence
  Description of Artificial Sequence: Synthetic peptide
  N-term H or Acetyl
  MOD_RES (16)..(16): Modified Cys
  MOD_RES (18)..(18): Ser or Phospho-Ser
  See specification as filed for detailed description of substitutions and preferred embodiments
KKKKKKKRPQRAESDCFS

SEQ ID NO: 3512 - protein, 18 aa, Artificial Sequence
  Description of Artificial Sequence: Synthetic peptide
  N-term H or Acetyl
  MOD_RES (16)..(16): Modified Cys
  MOD_RES (18)..(18): Ser or Phospho-Ser
  See specification as filed for detailed description of substitutions and preferred embodiments
KKKKKKKRPQRAESNCFS

SEQ ID NO: 3513 - protein, 18 aa, Artificial Sequence
  Description of Artificial Sequence: Synthetic peptide
  N-term H or Acetyl
  MOD_RES (14)..(14): Ser or Phospho-Ser
  MOD_RES (16)..(16): Modified Cys
  See specification as filed for detailed description of substitutions and preferred embodiments
KKKKKKKRPQRAHSDCFA

SEQ ID NO: 3514 - protein, 18 aa, Artificial Sequence
  Description of Artificial Sequence: Synthetic peptide
  N-term H or Acetyl
  MOD_RES (14)..(14): Ser or Phospho-Ser
  MOD_RES (16)..(16): Modified Cys
  See specification as filed for detailed description of substitutions and preferred embodiments
KKKKKKKRPQRAHSDCFS

SEQ ID NO: 3515 - protein, 18 aa, Artificial Sequence
  Description of Artificial Sequence: Synthetic peptide
  N-term H or Acetyl
  MOD_RES (14)..(14): Ser or Phospho-Ser
  MOD_RES (16)..(16): Modified Cys
  See specification as filed for detailed description of substitutions and preferred embodiments
KKKKKKKRPQRAHSNCFA

SEQ ID NO: 3516 - protein, 18 aa, Artificial Sequence
  Description of Artificial Sequence: Synthetic peptide
  N-term H or Acetyl
  MOD_RES (14)..(14): Ser or Phospho-Ser
  MOD_RES (16)..(16): Modified Cys
  See specification as filed for detailed description of substitutions and preferred embodiments
KKKKKKKRPQRAHSNCFS

SEQ ID NO: 3517 - protein, 18 aa, Artificial Sequence
  Description of Artificial Sequence: Synthetic peptide
  N-term H or Acetyl
  MOD_RES (16)..(16): Modified Cys
  MOD_RES (18)..(18): Ser or Phospho-Ser
  See specification as filed for detailed description of substitutions and preferred embodiments
KKKKKKKRPQRAHSDCFS

SEQ ID NO: 3518 - protein, 18 aa, Artificial Sequence
  Description of Artificial Sequence: Synthetic peptide
  N-term H or Acetyl
  MOD_RES (16)..(16): Modified Cys
  MOD_RES (18)..(18): Ser or Phospho-Ser
  See specification as filed for detailed description of substitutions and preferred embodiments
KKKKKKKRPQRAHSNCFS

SEQ ID NO: 3519 - protein, 18 aa, Artificial Sequence
  Description of Artificial Sequence: Synthetic peptide
  N-term H or Acetyl
  MOD_RES (14)..(14): Ser or Phospho-Ser
  MOD_RES (16)..(16): Modified Cys
  See specification as filed for detailed description of substitutions and preferred embodiments
KKKKKKKRPQRATSDCFA

SEQ ID NO: 3520 - protein, 18 aa, Artificial Sequence
  Description of Artificial Sequence: Synthetic peptide
  N-term H or Acetyl
  MOD_RES (14)..(14): Ser or Phospho-Ser
  MOD_RES (16)..(16): Modified Cys
  See specification as filed for detailed description of substitutions and preferred embodiments
KKKKKKKRPQRATSDCFS

SEQ ID NO: 3521 - protein, 18 aa, Artificial Sequence
  Description of Artificial Sequence: Synthetic peptide
  N-term H or Acetyl
  MOD_RES (14)..(14): Ser or Phospho-Ser
  MOD_RES (16)..(16): Modified Cys
  See specification as filed for detailed description of substitutions and preferred embodiments
KKKKKKKRPQRATSNCFA

SEQ ID NO: 3522 - protein, 18 aa, Artificial Sequence
  Description of Artificial Sequence: Synthetic peptide
  N-term H or Acetyl
  MOD_RES (14)..(14): Ser or Phospho-Ser
  MOD_RES (16)..(16): Modified Cys
  See specification as filed for detailed description of substitutions and preferred embodiments
KKKKKKKRPQRATSNCFS

SEQ ID NO: 3523 - protein, 18 aa, Artificial Sequence
  Description of Artificial Sequence: Synthetic peptide
  N-term H or Acetyl
  MOD_RES (16)..(16): Modified Cys
  MOD_RES (18)..(18): Ser or Phospho-Ser
  See specification as filed for detailed description of substitutions and preferred embodiments
KKKKKKKRPQRATSDCFS

SEQ ID NO: 3524 - protein, 18 aa, Artificial Sequence
  Description of Artificial Sequence: Synthetic peptide
  N-term H or Acetyl
  MOD_RES (16)..(16): Modified Cys
  MOD_RES (18)..(18): Ser or Phospho-Ser
  See specification as filed for detailed description of substitutions and preferred embodiments
KKKKKKKRPQRATSNCFS

SEQ ID NO: 3525 - protein, 18 aa, Artificial Sequence
  Description of Artificial Sequence: Synthetic peptide
  N-term H or Acetyl
  MOD_RES (14)..(14): Ser or Phospho-Ser
  MOD_RES (16)..(16): Modified Cys
  See specification as filed for detailed description of substitutions and preferred embodiments
KKKKRKKRPQRADSDCFA

SEQ ID NO: 3526 - protein, 18 aa, Artificial Sequence
  Description of Artificial Sequence: Synthetic peptide
  N-term H or Acetyl
  MOD_RES (14)..(14): Ser or Phospho-Ser
  MOD_RES (16)..(16): Modified Cys
  See specification as filed for detailed description of substitutions and preferred embodiments
KKKKRKKRPQRADSDCFS

SEQ ID NO: 3527 - protein, 18 aa, Artificial Sequence
  Description of Artificial Sequence: Synthetic peptide
  N-term H or Acetyl
  MOD_RES (14)..(14): Ser or Phospho-Ser
  MOD_RES (16)..(16): Modified Cys
  See specification as filed for detailed description of substitutions and preferred embodiments
KKKKRKKRPQRADSNCFA

SEQ ID NO: 3528 - protein, 18 aa, Artificial Sequence
  Description of Artificial Sequence: Synthetic peptide
  N-term H or Acetyl
  MOD_RES (14)..(14): Ser or Phospho-Ser
  MOD_RES (16)..(16): Modified Cys
  See specification as filed for detailed description of substitutions and preferred embodiments
KKKKRKKRPQRADSNCFS

SEQ ID NO: 3529 - protein, 18 aa, Artificial Sequence
  Description of Artificial Sequence: Synthetic peptide
  N-term H or Acetyl
  MOD_RES (16)..(16): Modified Cys
  MOD_RES (18)..(18): Ser or Phospho-Ser
  See specification as filed for detailed description of substitutions and preferred embodiments
KKKKRKKRPQRADSDCFS

SEQ ID NO: 3530 - protein, 18 aa, Artificial Sequence
  Description of Artificial Sequence: Synthetic peptide
  N-term H or Acetyl
  MOD_RES (16)..(16): Modified Cys
  MOD_RES (18)..(18): Ser or Phospho-Ser
  See specification as filed for detailed description of substitutions and preferred embodiments
KKKKRKKRPQRADSNCFS

SEQ ID NO: 3531 - protein, 18 aa, Artificial Sequence
  Description of Artificial Sequence: Synthetic peptide
  N-term H or Acetyl
  MOD_RES (14)..(14): Ser or Phospho-Ser
  MOD_RES (16)..(16): Modified Cys
  See specification as filed for detailed description of substitutions and preferred embodiments
KKKKRKKRPQRAESDCFA

SEQ ID NO: 3532 - protein, 18 aa, Artificial Sequence
  Description of Artificial Sequence: Synthetic peptide
  N-term H or Acetyl
  MOD_RES (14)..(14): Ser or Phospho-Ser
  MOD_RES (16)..(16): Modified Cys
  See specification as filed for detailed description of substitutions and preferred embodiments
KKKKRKKRPQRAESDCFS

SEQ ID NO: 3533 - protein, 18 aa, Artificial Sequence
  Description of Artificial Sequence: Synthetic peptide
  N-term H or Acetyl
  MOD_RES (14)..(14): Ser or Phospho-Ser
  MOD_RES (16)..(16): Modified Cys
  See specification as filed for detailed description of substitutions and preferred embodiments
KKKKRKKRPQRAESNCFA

SEQ ID NO: 3534 - protein, 18 aa, Artificial Sequence
  Description of Artificial Sequence: Synthetic peptide
  N-term H or Acetyl
  MOD_RES (14)..(14): Ser or Phospho-Ser
  MOD_RES (16)..(16): Modified Cys
  See specification as filed for detailed description of substitutions and preferred embodiments
KKKKRKKRPQRAESNCFS

SEQ ID NO: 3535 - protein, 18 aa, Artificial Sequence
  Description of Artificial Sequence: Synthetic peptide
  N-term H or Acetyl
  MOD_RES (16)..(16): Modified Cys
  MOD_RES (18)..(18): Ser or Phospho-Ser
  See specification as filed for detailed description of substitutions and preferred embodiments
KKKKRKKRPQRAESDCFS

SEQ ID NO: 3536 - protein, 18 aa, Artificial Sequence
  Description of Artificial Sequence: Synthetic peptide
  N-term H or Acetyl
  MOD_RES (16)..(16): Modified Cys
  MOD_RES (18)..(18): Ser or Phospho-Ser
  See specification as filed for detailed description of substitutions and preferred embodiments
KKKKRKKRPQRAESNCFS

SEQ ID NO: 3537 - protein, 18 aa, Artificial Sequence
  Description of Artificial Sequence: Synthetic peptide
  N-term H or Acetyl
  MOD_RES (14)..(14): Ser or Phospho-Ser
  MOD_RES (16)..(16): Modified Cys
  See specification as filed for detailed description of substitutions and preferred embodiments
KKKKRKKRPQRAHSDCFA

SEQ ID NO: 3538 - protein, 18 aa, Artificial Sequence
  Description of Artificial Sequence: Synthetic peptide
  N-term H or Acetyl
  MOD_RES (14)..(14): Ser or Phospho-Ser
  MOD_RES (16)..(16): Modified Cys
  See specification as filed for detailed description of substitutions and preferred embodiments
KKKKRKKRPQRAHSDCFS

SEQ ID NO: 3539 - protein, 18 aa, Artificial Sequence
  Description of Artificial Sequence: Synthetic peptide
  N-term H or Acetyl
  MOD_RES (14)..(14): Ser or Phospho-Ser
  MOD_RES (16)..(16): Modified Cys
  See specification as filed for detailed description of substitutions and preferred embodiments
KKKKRKKRPQRAHSNCFA

SEQ ID NO: 3540 - protein, 18 aa, Artificial Sequence
  Description of Artificial Sequence: Synthetic peptide
  N-term H or Acetyl
  MOD_RES (14)..(14): Ser or Phospho-Ser
  MOD_RES (16)..(16): Modified Cys
  See specification as filed for detailed description of substitutions and preferred embodiments
KKKKRKKRPQRAHSNCFS

SEQ ID NO: 3541 - protein, 18 aa, Artificial Sequence
  Description of Artificial Sequence: Synthetic peptide
  N-term H or Acetyl
  MOD_RES (16)..(16): Modified Cys
  MOD_RES (18)..(18): Ser or Phospho-Ser
  See specification as filed for detailed description of substitutions and preferred embodiments
KKKKRKKRPQRAHSDCFS

SEQ ID NO: 3542 - protein, 18 aa, Artificial Sequence
  Description of Artificial Sequence: Synthetic peptide
  N-term H or Acetyl
  MOD_RES (16)..(16): Modified Cys
  MOD_RES (18)..(18): Ser or Phospho-Ser
  See specification as filed for detailed description of substitutions and preferred embodiments
KKKKRKKRPQRAHSNCFS

SEQ ID NO: 3543 - protein, 18 aa, Artificial Sequence
  Description of Artificial Sequence: Synthetic peptide
  N-term H or Acetyl
  MOD_RES (14)..(14): Ser or Phospho-Ser
  MOD_RES (16)..(16): Modified Cys
  See specification as filed for detailed description of substitutions and preferred embodiments
KKKKRKKRPQRATSDCFA

SEQ ID NO: 3544 - protein, 18 aa, Artificial Sequence
  Description of Artificial Sequence: Synthetic peptide
  N-term H or Acetyl
  MOD_RES (14)..(14): Ser or Phospho-Ser
  MOD_RES (16)..(16): Modified Cys
  See specification as filed for detailed description of substitutions and preferred embodiments
KKKKRKKRPQRATSDCFS

SEQ ID NO: 3545 - protein, 18 aa, Artificial Sequence
  Description of Artificial Sequence: Synthetic peptide
  N-term H or Acetyl
  MOD_RES (14)..(14): Ser or Phospho-Ser
  MOD_RES (16)..(16): Modified Cys
  See specification as filed for detailed description of substitutions and preferred embodiments
KKKKRKKRPQRATSNCFA

SEQ ID NO: 3546 - protein, 18 aa, Artificial Sequence
  Description of Artificial Sequence: Synthetic peptide
  N-term H or Acetyl
  MOD_RES (14)..(14): Ser or Phospho-Ser
  MOD_RES (16)..(16): Modified Cys
  See specification as filed for detailed description of substitutions and preferred embodiments
KKKKRKKRPQRATSNCFS

SEQ ID NO: 3547 - protein, 18 aa, Artificial Sequence
  Description of Artificial Sequence: Synthetic peptide
  N-term H or Acetyl
  MOD_RES (16)..(16): Modified Cys
  MOD_RES (18)..(18): Ser or Phospho-Ser
  See specification as filed for detailed description of substitutions and preferred embodiments
KKKKRKKRPQRATSDCFS

SEQ ID NO: 3548 - protein, 18 aa, Artificial Sequence
  Description of Artificial Sequence: Synthetic peptide
  N-term H or Acetyl
  MOD_RES (16)..(16): Modified Cys
  MOD_RES (18)..(18): Ser or Phospho-Ser
  See specification as filed for detailed description of substitutions and preferred embodiments
KKKKRKKRPQRATSNCFS

SEQ ID NO: 3549 - protein, 18 aa, Artificial Sequence
  Description of Artificial Sequence: Synthetic peptide
  N-term H or Acetyl
  MOD_RES (14)..(14): Ser or Phospho-Ser
  MOD_RES (16)..(16): Modified Cys
  See specification as filed for detailed description of substitutions and preferred embodiments
KKKKTKKRPQRADSDCFA

SEQ ID NO: 3550 - protein, 18 aa, Artificial Sequence
  Description of Artificial Sequence: Synthetic peptide
  N-term H or Acetyl
  MOD_RES (14)..(14): Ser or Phospho-Ser
  MOD_RES (16)..(16): Modified Cys
  See specification as filed for detailed description of substitutions and preferred embodiments
KKKKTKKRPQRADSDCFS

SEQ ID NO: 3551 - protein, 18 aa, Artificial Sequence
  Description of Artificial Sequence: Synthetic peptide
  N-term H or Acetyl
  MOD_RES (14)..(14): Ser or Phospho-Ser
  MOD_RES (16)..(16): Modified Cys
  See specification as filed for detailed description of substitutions and preferred embodiments
KKKKTKKRPQRADSNCFA

SEQ ID NO: 3552 - protein, 18 aa, Artificial Sequence
  Description of Artificial Sequence: Synthetic peptide
  N-term H or Acetyl
  MOD_RES (14)..(14): Ser or Phospho-Ser
  MOD_RES (16)..(16): Modified Cys
  See specification as filed for detailed description of substitutions and preferred embodiments
KKKKTKKRPQRADSNCFS

SEQ ID NO: 3553 - protein, 18 aa, Artificial Sequence
  Description of Artificial Sequence: Synthetic peptide
  N-term H or Acetyl
  MOD_RES (16)..(16): Modified Cys
  MOD_RES (18)..(18): Ser or Phospho-Ser
  See specification as filed for detailed description of substitutions and preferred embodiments
KKKKTKKRPQRADSDCFS

SEQ ID NO: 3554 - protein, 18 aa, Artificial Sequence
  Description of Artificial Sequence: Synthetic peptide
  N-term H or Acetyl
  MOD_RES (16)..(16): Modified Cys
  MOD_RES (18)..(18): Ser or Phospho-Ser
  See specification as filed for detailed description of substitutions and preferred embodiments
KKKKTKKRPQRADSNCFS

SEQ ID NO: 3555 - protein, 18 aa, Artificial Sequence
  Description of Artificial Sequence: Synthetic peptide
  N-term H or Acetyl
  MOD_RES (14)..(14): Ser or Phospho-Ser
  MOD_RES (16)..(16): Modified Cys
  See specification as filed for detailed description of substitutions and preferred embodiments
KKKKTKKRPQRAESDCFA

SEQ ID NO: 3556 - protein, 18 aa, Artificial Sequence
  Description of Artificial Sequence: Synthetic peptide
  N-term H or Acetyl
  MOD_RES (14)..(14): Ser or Phospho-Ser
  MOD_RES (16)..(16): Modified Cys
  See specification as filed for detailed description of substitutions and preferred embodiments
KKKKTKKRPQRAESDCFS

SEQ ID NO: 3557 - protein, 18 aa, Artificial Sequence
  Description of Artificial Sequence: Synthetic peptide
  N-term H or Acetyl
  MOD_RES (14)..(14): Ser or Phospho-Ser
  MOD_RES (16)..(16): Modified Cys
  See specification as filed for detailed description of substitutions and preferred embodiments
KKKKTKKRPQRAESNCFA

SEQ ID NO: 3558 - protein, 18 aa, Artificial Sequence
  Description of Artificial Sequence: Synthetic peptide
  N-term H or Acetyl
  MOD_RES (14)..(14): Ser or Phospho-Ser
  MOD_RES (16)..(16): Modified Cys
  See specification as filed for detailed description of substitutions and preferred embodiments
KKKKTKKRPQRAESNCFS

SEQ ID NO: 3559 - protein, 18 aa, Artificial Sequence
  Description of Artificial Sequence: Synthetic peptide
  N-term H or Acetyl
  MOD_RES (16)..(16): Modified Cys
  MOD_RES (18)..(18): Ser or Phospho-Ser
  See specification as filed for detailed description of substitutions and preferred embodiments
KKKKTKKRPQRAESDCFS

SEQ ID NO: 3560 - protein, 18 aa, Artificial Sequence
  Description of Artificial Sequence: Synthetic peptide
  N-term H or Acetyl
  MOD_RES (16)..(16): Modified Cys
  MOD_RES (18)..(18): Ser or Phospho-Ser
  See specification as filed for detailed description of substitutions and preferred embodiments
KKKKTKKRPQRAESNCFS

SEQ ID NO: 3561 - protein, 18 aa, Artificial Sequence
  Description of Artificial Sequence: Synthetic peptide
  N-term H or Acetyl
  MOD_RES (14)..(14): Ser or Phospho-Ser
  MOD_RES (16)..(16): Modified Cys
  See specification as filed for detailed description of substitutions and preferred embodiments
KKKKTKKRPQRAHSDCFA

SEQ ID NO: 3562 - protein, 18 aa, Artificial Sequence
  Description of Artificial Sequence: Synthetic peptide
  N-term H or Acetyl
  MOD_RES (14)..(14): Ser or Phospho-Ser
  MOD_RES (16)..(16): Modified Cys
  See specification as filed for detailed description of substitutions and preferred embodiments
KKKKTKKRPQRAHSDCFS

SEQ ID NO: 3563 - protein, 18 aa, Artificial Sequence
  Description of Artificial Sequence: Synthetic peptide
  N-term H or Acetyl
  MOD_RES (14)..(14): Ser or Phospho-Ser
  MOD_RES (16)..(16): Modified Cys
  See specification as filed for detailed description of substitutions and preferred embodiments
KKKKTKKRPQRAHSNCFA

SEQ ID NO: 3564 - protein, 18 aa, Artificial Sequence
  Description of Artificial Sequence: Synthetic peptide
  N-term H or Acetyl
  MOD_RES (14)..(14): Ser or Phospho-Ser
  MOD_RES (16)..(16): Modified Cys
  See specification as filed for detailed description of substitutions and preferred embodiments
KKKKTKKRPQRAHSNCFS

SEQ ID NO: 3565 - protein, 18 aa, Artificial Sequence
  Description of Artificial Sequence: Synthetic peptide
  N-term H or Acetyl
  MOD_RES (16)..(16): Modified Cys
  MOD_RES (18)..(18): Ser or Phospho-Ser
  See specification as filed for detailed description of substitutions and preferred embodiments
KKKKTKKRPQRAHSDCFS

SEQ ID NO: 3566 - protein, 18 aa, Artificial Sequence
  Description of Artificial Sequence: Synthetic peptide
  N-term H or Acetyl
  MOD_RES (16)..(16): Modified Cys
  MOD_RES (18)..(18): Ser or Phospho-Ser
  See specification as filed for detailed description of substitutions and preferred embodiments
KKKKTKKRPQRAHSNCFS

SEQ ID NO: 3567 - protein, 18 aa, Artificial Sequence
  Description of Artificial Sequence: Synthetic peptide
  N-term H or Acetyl
  MOD_RES (14)..(14): Ser or Phospho-Ser
  MOD_RES (16)..(16): Modified Cys
  See specification as filed for detailed description of substitutions and preferred embodiments
KKKKTKKRPQRATSDCFA

SEQ ID NO: 3568 - protein, 18 aa, Artificial Sequence
  Description of Artificial Sequence: Synthetic peptide
  N-term H or Acetyl
  MOD_RES (14)..(14): Ser or Phospho-Ser
  MOD_RES (16)..(16): Modified Cys
  See specification as filed for detailed description of substitutions and preferred embodiments
KKKKTKKRPQRATSDCFS

SEQ ID NO: 3569 - protein, 18 aa, Artificial Sequence
  Description of Artificial Sequence: Synthetic peptide
  N-term H or Acetyl
  MOD_RES (14)..(14): Ser or Phospho-Ser
  MOD_RES (16)..(16): Modified Cys
  See specification as filed for detailed description of substitutions and preferred embodiments
KKKKTKKRPQRATSNCFA

SEQ ID NO: 3570 - protein, 18 aa, Artificial Sequence
  Description of Artificial Sequence: Synthetic peptide
  N-term H or Acetyl
  MOD_RES (14)..(14): Ser or Phospho-Ser
  MOD_RES (16)..(16): Modified Cys
  See specification as filed for detailed description of substitutions and preferred embodiments
KKKKTKKRPQRATSNCFS

SEQ ID NO: 3571 - protein, 18 aa, Artificial Sequence
  Description of Artificial Sequence: Synthetic peptide
  N-term H or Acetyl
  MOD_RES (16)..(16): Modified Cys
  MOD_RES (18)..(18): Ser or Phospho-Ser
  See specification as filed for detailed description of substitutions and preferred embodiments
KKKKTKKRPQRATSDCFS

SEQ ID NO: 3572 - protein, 18 aa, Artificial Sequence
  Description of Artificial Sequence: Synthetic peptide
  N-term H or Acetyl
  MOD_RES (16)..(16): Modified Cys
  MOD_RES (18)..(18): Ser or Phospho-Ser
  See specification as filed for detailed description of substitutions and preferred embodiments
KKKKTKKRPQRATSNCFS

SEQ ID NO: 3573 - protein, 18 aa, Artificial Sequence
  Description of Artificial Sequence: Synthetic peptide
  N-term H or Acetyl
  MOD_RES (13)..(13): Glu or Homoglutamic Acid
  MOD_RES (14)..(14): Ser or Phospho-Ser
  MOD_RES (16)..(16): Modified Cys
  See specification as filed for detailed description of substitutions and preferred embodiments
KKKKVKKRPQRAESDCFS

SEQ ID NO: 3574 - protein, 18 aa, Artificial Sequence
  Description of Artificial Sequence: Synthetic peptide
  N-term H or Acetyl
  MOD_RES (13)..(13): Glu or Homoglutamic Acid
  MOD_RES (16)..(16): Modified Cys
  MOD_RES (18)..(18): Ser or Phospho-Ser
  See specification as filed for detailed description of substitutions and preferred embodiments
KKKKVKKRPQRAESDCFS

SEQ ID NO: 3575 - protein, 18 aa, Artificial Sequence
  Description of Artificial Sequence: Synthetic peptide
  N-term H or Acetyl
  MOD_RES (14)..(14): Ser or Phospho-Ser
  MOD_RES (16)..(16): Modified Cys
  See specification as filed for detailed description of substitutions and preferred embodiments
KKKKVKKRPQRADSDCFA

SEQ ID NO: 3576 - protein, 18 aa, Artificial Sequence
  Description of Artificial Sequence: Synthetic peptide
  N-term H or Acetyl
  MOD_RES (14)..(14): Ser or Phospho-Ser
  MOD_RES (16)..(16): Modified Cys
  See specification as filed for detailed description of substitutions and preferred embodiments
KKKKVKKRPQRADSDCFS

SEQ ID NO: 3577 - protein, 18 aa, Artificial Sequence
  Description of Artificial Sequence: Synthetic peptide
  N-term H or Acetyl
  MOD_RES (14)..(14): Ser or Phospho-Ser
  MOD_RES (16)..(16): Modified Cys
  See specification as filed for detailed description of substitutions and preferred embodiments
KKKKVKKRPQRADSNCFA

SEQ ID NO: 3578 - protein, 18 aa, Artificial Sequence
  Description of Artificial Sequence: Synthetic peptide
  N-term H or Acetyl
  MOD_RES (14)..(14): Ser or Phospho-Ser
  MOD_RES (16)..(16): Modified Cys
  See specification as filed for detailed description of substitutions and preferred embodiments
KKKKVKKRPQRADSNCFS

SEQ ID NO: 3579 - protein, 18 aa, Artificial Sequence
  Description of Artificial Sequence: Synthetic peptide
  N-term H or Acetyl
  MOD_RES (16)..(16): Modified Cys
  MOD_RES (18)..(18): Ser or Phospho-Ser
  See specification as filed for detailed description of substitutions and preferred embodiments
KKKKVKKRPQRADSDCFS

SEQ ID NO: 3580 - protein, 18 aa, Artificial Sequence
  Description of Artificial Sequence: Synthetic peptide
  N-term H or Acetyl
  MOD_RES (16)..(16): Modified Cys
  MOD_RES (18)..(18): Ser or Phospho-Ser
  See specification as filed for detailed description of substitutions and preferred embodiments
KKKKVKKRPQRADSNCFS

SEQ ID NO: 3581 - protein, 18 aa, Artificial Sequence
  Description of Artificial Sequence: Synthetic peptide
  N-term H or Acetyl
  MOD_RES (14)..(14): Ser or Phospho-Ser
  MOD_RES (16)..(16): Modified Cys
  See specification as filed for detailed description of substitutions and preferred embodiments
KKKKVKKRPQRAESDCFA

SEQ ID NO: 3582 - protein, 18 aa, Artificial Sequence
  Description of Artificial Sequence: Synthetic peptide
  N-term H or Acetyl
  MOD_RES (14)..(14): Ser or Phospho-Ser
  MOD_RES (16)..(16): Modified Cys
  See specification as filed for detailed description of substitutions and preferred embodiments
KKKKVKKRPQRAESDCFS

SEQ ID NO: 3583 - protein, 18 aa, Artificial Sequence
  Description of Artificial Sequence: Synthetic peptide
  N-term H or Acetyl
  MOD_RES (14)..(14): Ser or Phospho-Ser
  MOD_RES (16)..(16): Modified Cys
  See specification as filed for detailed description of substitutions and preferred embodiments
KKKKVKKRPQRAESNCFA

SEQ ID NO: 3584 - protein, 18 aa, Artificial Sequence
  Description of Artificial Sequence: Synthetic peptide
  N-term H or Acetyl
  MOD_RES (14)..(14): Ser or Phospho-Ser
  MOD_RES (16)..(16): Modified Cys
  See specification as filed for detailed description of substitutions and preferred embodiments
KKKKVKKRPQRAESNCFS

SEQ ID NO: 3585 - protein, 18 aa, Artificial Sequence
  Description of Artificial Sequence: Synthetic peptide
  N-term H or Acetyl
  MOD_RES (16)..(16): Modified Cys
  MOD_RES (18)..(18): Ser or Phospho-Ser
  See specification as filed for detailed description of substitutions and preferred embodiments
KKKKVKKRPQRAESDCFS

SEQ ID NO: 3586 - protein, 18 aa, Artificial Sequence
  Description of Artificial Sequence: Synthetic peptide
  N-term H or Acetyl
  MOD_RES (16)..(16): Modified Cys
  MOD_RES (18)..(18): Ser or Phospho-Ser
  See specification as filed for detailed description of substitutions and preferred embodiments
KKKKVKKRPQRAESNCFS

SEQ ID NO: 3587 - protein, 18 aa, Artificial Sequence
  Description of Artificial Sequence: Synthetic peptide
  N-term H or Acetyl
  MOD_RES (14)..(14): Ser or Phospho-Ser
  MOD_RES (16)..(16): Modified Cys
  See specification as filed for detailed description of substitutions and preferred embodiments
KKKKVKKRPQRAHSDCFA

SEQ ID NO: 3588 - protein, 18 aa, Artificial Sequence
  Description of Artificial Sequence: Synthetic peptide
  N-term H or Acetyl
  MOD_RES (14)..(14): Ser or Phospho-Ser
  MOD_RES (16)..(16): Modified Cys
  See specification as filed for detailed description of substitutions and preferred embodiments
KKKKVKKRPQRAHSDCFS

SEQ ID NO: 3589 - protein, 18 aa, Artificial Sequence
  Description of Artificial Sequence: Synthetic peptide
  N-term H or Acetyl
  MOD_RES (14)..(14): Ser or Phospho-Ser
  MOD_RES (16)..(16): Modified Cys
  See specification as filed for detailed description of substitutions and preferred embodiments
KKKKVKKRPQRAHSNCFA

SEQ ID NO: 3590 - protein, 18 aa, Artificial Sequence
  Description of Artificial Sequence: Synthetic peptide
  N-term H or Acetyl
  MOD_RES (14)..(14): Ser or Phospho-Ser
  MOD_RES (16)..(16): Modified Cys
  See specification as filed for detailed description of substitutions and preferred embodiments
KKKKVKKRPQRAHSNCFS

SEQ ID NO: 3591 - protein, 18 aa, Artificial Sequence
  Description of Artificial Sequence: Synthetic peptide
  N-term H or Acetyl
  MOD_RES (16)..(16): Modified Cys
  MOD_RES (18)..(18): Ser or Phospho-Ser
  See specification as filed for detailed description of substitutions and preferred embodiments
KKKKVKKRPQRAHSDCFS

SEQ ID NO: 3592 - protein, 18 aa, Artificial Sequence
  Description of Artificial Sequence: Synthetic peptide
  N-term H or Acetyl
  MOD_RES (16)..(16): Modified Cys
  MOD_RES (18)..(18): Ser or Phospho-Ser
  See specification as filed for detailed description of substitutions and preferred embodiments
KKKKVKKRPQRAHSNCFS

SEQ ID NO: 3593 - protein, 18 aa, Artificial Sequence
  Description of Artificial Sequence: Synthetic peptide
  N-term H or Acetyl
  MOD_RES (14)..(14): Ser or Phospho-Ser
  MOD_RES (16)..(16): Modified Cys
  See specification as filed for detailed description of substitutions and preferred embodiments
KKKKVKKRPQRATSDCFA

SEQ ID NO: 3594 - protein, 18 aa, Artificial Sequence
  Description of Artificial Sequence: Synthetic peptide
  N-term H or Acetyl
  MOD_RES (14)..(14): Ser or Phospho-Ser
  MOD_RES (16)..(16): Modified Cys
  See specification as filed for detailed description of substitutions and preferred embodiments
KKKKVKKRPQRATSDCFS

SEQ ID NO: 3595 - protein, 18 aa, Artificial Sequence
  Description of Artificial Sequence: Synthetic peptide
  N-term H or Acetyl
  MOD_RES (14)..(14): Ser or Phospho-Ser
  MOD_RES (16)..(16): Modified Cys
  See specification as filed for detailed description of substitutions and preferred embodiments
KKKKVKKRPQRATSNCFA

SEQ ID NO: 3596 - protein, 18 aa, Artificial Sequence
  Description of Artificial Sequence: Synthetic peptide
  N-term H or Acetyl
  MOD_RES (14)..(14): Ser or Phospho-Ser
  MOD_RES (16)..(16): Modified Cys
  See specification as filed for detailed description of substitutions and preferred embodiments
KKKKVKKRPQRATSNCFS

SEQ ID NO: 3597 - protein, 18 aa, Artificial Sequence
  Description of Artificial Sequence: Synthetic peptide
  N-term H or Acetyl
  MOD_RES (16)..(16): Modified Cys
  MOD_RES (18)..(18): Ser or Phospho-Ser
  See specification as filed for detailed description of substitutions and preferred embodiments
KKKKVKKRPQRATSDCFS

SEQ ID NO: 3598 - protein, 18 aa, Artificial Sequence
  Description of Artificial Sequence: Synthetic peptide
  N-term H or Acetyl
  MOD_RES (16)..(16): Modified Cys
  MOD_RES (18)..(18): Ser or Phospho-Ser
  See specification as filed for detailed description of substitutions and preferred embodiments
KKKKVKKRPQRATSNCFS

SEQ ID NO: 3599 - protein, 18 aa, Artificial Sequence
  Description of Artificial Sequence: Synthetic peptide
  N-term H or Acetyl
  MOD_RES (11)..(11): Ser or Phospho-Ser
  MOD_RES (13)..(13): Modified Cys
  See specification as filed for detailed description of substitutions and preferred embodiments
KKKLAPNPSFSPCPGFTP

SEQ ID NO: 3600 - protein, 18 aa, Artificial Sequence
  Description of Artificial Sequence: Synthetic peptide
  N-term H or Acetyl
  MOD_RES (8)..(8): Leu or Nle (i.e. isomer of Leucine)
  MOD_RES (11)..(11): Ser or Phospho-Ser
  MOD_RES (13)..(13): Modified Cys
  See specification as filed for detailed description of substitutions and preferred embodiments
KKKLIDSLANSFCGTRSY

SEQ ID NO: 3601 - protein, 18 aa, Artificial Sequence
  Description of Artificial Sequence: Synthetic peptide
  N-term H or Acetyl
  MOD_RES (8)..(8): Leu or Nle (i.e. isomer of Leucine)
  MOD_RES (13)..(13): Modified Cys
  MOD_RES (15)..(15): Thr or Phospho-Thr
  See specification as filed for detailed description of substitutions and preferred embodiments
KKKLIDSLANSFCGTRSY

SEQ ID NO: 3602 - protein, 18 aa, Artificial Sequence
  Description of Artificial Sequence: Synthetic peptide
  N-term H or Acetyl
  MOD_RES (11)..(11): Thr or Phospho-Thr
  MOD_RES (13)..(13): Modified Cys
  See specification as filed for detailed description of substitutions and preferred embodiments
KKKLPPVFSGTPCGSGAG

SEQ ID NO: 3603 - protein, 18 aa, Artificial Sequence
  Description of Artificial Sequence: Synthetic peptide
  N-term H or Acetyl
  MOD_RES (13)..(13): Modified Cys
  MOD_RES (15)..(15): Ser or Phospho-Ser
  See specification as filed for detailed description of substitutions and preferred embodiments
KKKLPPVFSGTPCGSGAG

SEQ ID NO: 3604 - protein, 18 aa, Artificial Sequence
  Description of Artificial Sequence: Synthetic peptide
  N-term H or Acetyl
  MOD_RES (11)..(11): Ser or Phospho-Ser
  MOD_RES (13)..(13): Modified Cys
  See specification as filed for detailed description of substitutions and preferred embodiments
KKKLSNSQGQSPCVPFPA

SEQ ID NO: 3605 - protein, 18 aa, Artificial Sequence
  Description of Artificial Sequence: Synthetic peptide
  N-term H or Acetyl
  MOD_RES (11)..(11): Ser or Phospho-Ser
  MOD_RES (13)..(13): Modified Cys
  See specification as filed for detailed description of substitutions and preferred embodiments
KKKLTDPRLLSPCQPALQ

SEQ ID NO: 3606 - protein, 17 aa, Artificial Sequence
  Description of Artificial Sequence: Synthetic peptide
  N-term H or Acetyl
  MOD_RES (7)..(7): Leu or Nle (i.e. isomer of Leucine)
  MOD_RES (11)..(11): Thr or Phospho-Thr
  MOD_RES (13)..(13): Modified Cys
  See specification as filed for detailed description of substitutions and preferred embodiments
KKKNVHLVSTTLCVDSR

SEQ ID NO: 3607 - protein, 18 aa, Artificial Sequence
  Description of Artificial Sequence: Synthetic peptide
  N-term H or Acetyl
  MOD_RES (11)..(11): Ser or Phospho-Ser
  MOD_RES (13)..(13): Modified Cys
  See specification as filed for detailed description of substitutions and preferred embodiments
KKKPLSPFPVSPCAGPGS

SEQ ID NO: 3608 - protein, 16 aa, Artificial Sequence
  Description of Artificial Sequence: Synthetic peptide
  N-term H or Acetyl
  MOD_RES (9)..(9): Ser or Phospho-Ser
  MOD_RES (11)..(11): Modified Cys
  See specification as filed for detailed description of substitutions and preferred embodiments
KKKPQPLRSPCLDNPT

SEQ ID NO: 3609 - protein, 15 aa, Artificial Sequence
  Description of Artificial Sequence: Synthetic peptide
  N-term H or Acetyl
  MOD_RES (8)..(8): Thr or Phospho-Thr
  MOD_RES (10)..(10): Modified Cys
  See specification as filed for detailed description of substitutions and preferred embodiments
KKKPQRATSCVFAMF

SEQ ID NO: 3610 - protein, 18 aa, Artificial Sequence
  Description of Artificial Sequence: Synthetic peptide
  N-term H or Acetyl
  MOD_RES (9)..(9): Modified Cys
  MOD_RES (11)..(11): Thr or Phospho-Thr
  See specification as filed for detailed description of substitutions and preferred embodiments
KKKPSAPACSTPGIRDSA

SEQ ID NO: 3611 - protein, 18 aa, Artificial Sequence
  Description of Artificial Sequence: Synthetic peptide
  N-term H or Acetyl
  MOD_RES (11)..(11): Thr or Phospho-Thr
  MOD_RES (13)..(13): Modified Cys
  See specification as filed for detailed description of substitutions and preferred embodiments
KKKPSAPALSTPCIRDSA

SEQ ID NO: 3612 - protein, 18 aa, Artificial Sequence
  Description of Artificial Sequence: Synthetic peptide
  N-term H or Acetyl
  MOD_RES (11)..(11): Thr or Phospho-Thr
  MOD_RES (14)..(14): Modified Cys
  See specification as filed for detailed description of substitutions and preferred embodiments
KKKPSAPALSTPGCRDSA

SEQ ID NO: 3613 - protein, 18 aa, Artificial Sequence
  Description of Artificial Sequence: Synthetic peptide
  N-term H or Acetyl
  MOD_RES (5)..(5): Leu or Nle (i.e. isomer of Leucine)
  MOD_RES (11)..(11): Thr or Phospho-Thr
  MOD_RES (13)..(13): Modified Cys
  See specification as filed for detailed description of substitutions and preferred embodiments
KKKQLAGTPITPCKDGFT

SEQ ID NO: 3614 - protein, 18 aa, Artificial Sequence
  Description of Artificial Sequence: Synthetic peptide
  N-term H or Acetyl
  MOD_RES (11)..(11): Ser or Phospho-Ser
  MOD_RES (13)..(13): Modified Cys
  See specification as filed for detailed description of substitutions and preferred embodiments
KKKQAATGFGSPCQYSAD

SEQ ID NO: 3615 - protein, 18 aa, Artificial Sequence
  Description of Artificial Sequence: Synthetic peptide
  N-term H or Acetyl
  MOD_RES (11)..(11): Thr or Phospho-Thr
  MOD_RES (13)..(13): Modified Cys
  See specification as filed for detailed description of substitutions and preferred embodiments
KKKQGPAPVGTPCFNRQH

SEQ ID NO: 3616 - protein, 18 aa, Artificial Sequence
  Description of Artificial Sequence: Synthetic peptide
  N-term H or Acetyl
  MOD_RES (11)..(11): Ser or Phospho-Ser
  MOD_RES (13)..(13): Modified Cys
  See specification as filed for detailed description of substitutions and preferred embodiments
KKKQLSKWPGSPCSRSSD

SEQ ID NO: 3617 - protein, 18 aa, Artificial Sequence
  Description of Artificial Sequence: Synthetic peptide
  N-term H or Acetyl
  MOD_RES (11)..(11): Ser or Phospho-Ser
  MOD_RES (13)..(13): Modified Cys
  See specification as filed for detailed description of substitutions and preferred embodiments
KKKQNRSGAMSPCSWNSD

SEQ ID NO: 3618 - protein, 18 aa, Artificial Sequence
  Description of Artificial Sequence: Synthetic peptide
  N-term H or Acetyl
  MOD_RES (6)..(6): Leu or Nle (i.e. isomer of Leucine)
  MOD_RES (11)..(11): Thr or Phospho-Thr
  MOD_RES (13)..(13): Modified Cys
  See specification as filed for detailed description of substitutions and preferred embodiments
KKKQSLVVPQTPCHTARV

SEQ ID NO: 3619 - protein, 18 aa, Artificial Sequence
  Description of Artificial Sequence: Synthetic peptide
  N-term H or Acetyl
  MOD_RES (6)..(6): Leu or Nle (i.e. isomer of Leucine)
  MOD_RES (13)..(13): Modified Cys
  MOD_RES (15)..(15): Thr or Phospho-Thr
  See specification as filed for detailed description of substitutions and preferred embodiments
KKKQSLVVPQTPCHTARV

SEQ ID NO: 3620 - protein, 18 aa, Artificial Sequence
  Description of Artificial Sequence: Synthetic peptide
  N-term H or Acetyl
  MOD_RES (9)..(9): Modified Cys
  MOD_RES (11)..(11): Thr or Phospho-Thr
  See specification as filed for detailed description of substitutions and preferred embodiments
KKKQSAQSCATPVVSVAT

SEQ ID NO: 3621 - protein, 18 aa, Artificial Sequence
  Description of Artificial Sequence: Synthetic peptide
  N-term H or Acetyl
  MOD_RES (11)..(11): Thr or Phospho-Thr
  MOD_RES (13)..(13): Modified Cys
  See specification as filed for detailed description of substitutions and preferred embodiments
KKKQSAQSLATPCVSVAT

SEQ ID NO: 3622 - protein, 18 aa, Artificial Sequence
  Description of Artificial Sequence: Synthetic peptide
  N-term H or Acetyl
  MOD_RES (13)..(13): Modified Cys
  MOD_RES (15)..(15): Ser or Phospho-Ser
  See specification as filed for detailed description of substitutions and preferred embodiments
KKKQSAQSLATPCVSVAT

SEQ ID NO: 3623 - protein, 18 aa, Artificial Sequence
  Description of Artificial Sequence: Synthetic peptide
  N-term H or Acetyl
  MOD_RES (11)..(11): Ser or Phospho-Ser
  MOD_RES (13)..(13): Modified Cys
  See specification as filed for detailed description of substitutions and preferred embodiments
KKKRPASVNGSPCATSES

SEQ ID NO: 3624 - protein, 18 aa, Artificial Sequence
  Description of Artificial Sequence: Synthetic peptide
  N-term H or Acetyl
  MOD_RES (13)..(13): Modified Cys
  MOD_RES (15)..(15): Thr or Phospho-Thr
  See specification as filed for detailed description of substitutions and preferred embodiments
KKKRPASVNGSPCATSES

SEQ ID NO: 3625 - protein, 16 aa, Artificial Sequence
  Description of Artificial Sequence: Synthetic peptide
  N-term H or Acetyl
  MOD_RES (5)..(5): Leu or Nle (i.e. isomer of Leucine)
  MOD_RES (11)..(11): Thr or Phospho-Thr
  MOD_RES (13)..(13): Modified Cys
  See specification as filed for detailed description of substitutions and preferred embodiments
KKKSLDGLFGTICYLP

SEQ ID NO: 3626 - protein, 18 aa, Artificial Sequence
  Description of Artificial Sequence: Synthetic peptide
  N-term H or Acetyl
  MOD_RES (9)..(9): Modified Cys
  MOD_RES (11)..(11): Ser or Phospho-Ser
  MOD_RES (14)..(14): Leu or Nle (i.e. isomer of Leucine)
  See specification as filed for detailed description of substitutions and preferred embodiments
KKKSALQGCNSPGLLSLG

SEQ ID NO: 3627 - protein, 18 aa, Artificial Sequence
  Description of Artificial Sequence: Synthetic peptide
  N-term H or Acetyl
  MOD_RES (11)..(11): Ser or Phospho-Ser
  MOD_RES (13)..(13): Modified Cys
  MOD_RES (14)..(14): Leu or Nle (i.e. isomer of Leucine)
  See specification as filed for detailed description of substitutions and preferred embodiments
KKKSALQGFNSPCLLSLG

SEQ ID NO: 3628 - protein, 18 aa, Artificial Sequence
  Description of Artificial Sequence: Synthetic peptide
  N-term H or Acetyl
  MOD_RES (11)..(11): Ser or Phospho-Ser
  MOD_RES (13)..(13): Modified Cys
  See specification as filed for detailed description of substitutions and preferred embodiments
KKKSASGSAFSPCPGSAA

SEQ ID NO: 3629 - protein, 18 aa, Artificial Sequence
  Description of Artificial Sequence: Synthetic peptide
  N-term H or Acetyl
  MOD_RES (11)..(11): Ser or Phospho-Ser
  MOD_RES (13)..(13): Modified Cys
  See specification as filed for detailed description of substitutions and preferred embodiments
KKKSAVNGTSSACTNLEA

SEQ ID NO: 3630 - protein, 18 aa, Artificial Sequence
  Description of Artificial Sequence: Synthetic peptide
  N-term H or Acetyl
  MOD_RES (7)..(7): Ser or Phospho-Ser
  MOD_RES (9)..(9): Modified Cys
  See specification as filed for detailed description of substitutions and preferred embodiments
KKKSGYSSCGSPGTPGSR

SEQ ID NO: 3631 - protein, 18 aa, Artificial Sequence
  Description of Artificial Sequence: Synthetic peptide
  N-term H or Acetyl
  MOD_RES (9)..(9): Modified Cys
  MOD_RES (11)..(11): Ser or Phospho-Ser
  See specification as filed for detailed description of substitutions and preferred embodiments
KKKSGYSSCGSPGTPGSR

SEQ ID NO: 3632 - protein, 18 aa, Artificial Sequence
  Description of Artificial Sequence: Synthetic peptide
  N-term H or Acetyl
  MOD_RES (11)..(11): Ser or Phospho-Ser
  MOD_RES (13)..(13): Modified Cys
  See specification as filed for detailed description of substitutions and preferred embodiments
KKKSGYSSPGSPCTPGSR

SEQ ID NO: 3633 - protein, 18 aa, Artificial Sequence
  Description of Artificial Sequence: Synthetic peptide
  N-term H or Acetyl
  MOD_RES (11)..(11): Ser or Phospho-Ser
  MOD_RES (14)..(14): Modified Cys
  See specification as filed for detailed description of substitutions and preferred embodiments
KKKSGYSSPGSPGCPGSR

SEQ ID NO: 3634 - protein, 18 aa, Artificial Sequence
  Description of Artificial Sequence: Synthetic peptide
  N-term H or Acetyl
  MOD_RES (11)..(11): Thr or Phospho-Thr
  MOD_RES (13)..(13): Modified Cys
  See specification as filed for detailed description of substitutions and preferred embodiments
KKKSNGHITTTPCPTQFL

SEQ ID NO: 3635 - protein, 18 aa, Artificial Sequence
  Description of Artificial Sequence: Synthetic peptide
  N-term H or Acetyl
  MOD_RES (13)..(13): Modified Cys
  MOD_RES (15)..(15): Thr or Phospho-Thr
  See specification as filed for detailed description of substitutions and preferred embodiments
KKKSNGHITTTPCPTQFL

SEQ ID NO: 3636 - protein, 18 aa, Artificial Sequence
  Description of Artificial Sequence: Synthetic peptide
  N-term H or Acetyl
  MOD_RES (11)..(11): Thr or Phospho-Thr
  MOD_RES (13)..(13): Modified Cys
  See specification as filed for detailed description of substitutions and preferred embodiments
KKKSNGLVTTTPCSSQFL

SEQ ID NO: 3637 - protein, 18 aa, Artificial Sequence
  Description of Artificial Sequence: Synthetic peptide
  N-term H or Acetyl
  MOD_RES (13)..(13): Modified Cys
  MOD_RES (15)..(15): Ser or Phospho-Ser
  See specification as filed for detailed description of substitutions and preferred embodiments
KKKSNGLVTTTPCSSQFL

SEQ ID NO: 3638 - protein, 18 aa, Artificial Sequence
  Description of Artificial Sequence: Synthetic peptide
  N-term H or Acetyl
  MOD_RES (11)..(11): Thr or Phospho-Thr
  MOD_RES (13)..(13): Modified Cys
  See specification as filed for detailed description of substitutions and preferred embodiments
KKKSNGVITTTPCPPGQY

SEQ ID NO: 3639 - protein, 18 aa, Artificial Sequence
  Description of Artificial Sequence: Synthetic peptide
  N-term H or Acetyl
  MOD_RES (11)..(11): Ser or Phospho-Ser
  MOD_RES (13)..(13): Modified Cys
  See specification as filed for detailed description of substitutions and preferred embodiments
KKKSNPALLSSPCYYSAA

SEQ ID NO: 3640 - protein, 18 aa, Artificial Sequence
  Description of Artificial Sequence: Synthetic peptide
  N-term H or Acetyl
  MOD_RES (11)..(11): Thr or Phospho-Thr
  MOD_RES (13)..(13): Modified Cys
  See specification as filed for detailed description of substitutions and preferred embodiments
KKKSPLNITSTPCPDASS

SEQ ID NO: 3641 - protein, 18 aa, Artificial Sequence
  Description of Artificial Sequence: Synthetic peptide
  N-term H or Acetyl
  MOD_RES (11)..(11): Thr or Phospho-Thr
  MOD_RES (13)..(13): Modified Cys
  See specification as filed for detailed description of substitutions and preferred embodiments
KKKSVPSAAVTPCNESLQ

SEQ ID NO: 3642 - protein, 18 aa, Artificial Sequence
  Description of Artificial Sequence: Synthetic peptide
  N-term H or Acetyl
  MOD_RES (11)..(11): Thr or Phospho-Thr
  MOD_RES (13)..(13): Modified Cys
  See specification as filed for detailed description of substitutions and preferred embodiments
KKKSVSAATLTPCSQAVT

SEQ ID NO: 3643 - protein, 17 aa, Artificial Sequence
  Description of Artificial Sequence: Synthetic peptide
  N-term H or Acetyl
  MOD_RES (10)..(10): Thr or Phospho-Thr
  MOD_RES (12)..(12): Modified Cys
  MOD_RES (14)..(14): Leu or Nle (i.e. isomer of Leucine)
  See specification as filed for detailed description of substitutions and preferred embodiments
KKKTETFTGTLCYLAPE

SEQ ID NO: 3644 - protein, 18 aa, Artificial Sequence
  Description of Artificial Sequence: Synthetic peptide
  N-term H or Acetyl
  MOD_RES (14)..(14): Ser or Phospho-Ser
  MOD_RES (16)..(16): Modified Cys
  See specification as filed for detailed description of substitutions and preferred embodiments
KKKTKKKRPQRADSDCFA

SEQ ID NO: 3645 - protein, 18 aa, Artificial Sequence
  Description of Artificial Sequence: Synthetic peptide
  N-term H or Acetyl
  MOD_RES (14)..(14): Ser or Phospho-Ser
  MOD_RES (16)..(16): Modified Cys
  See specification as filed for detailed description of substitutions and preferred embodiments
KKKTKKKRPQRADSDCFS

SEQ ID NO: 3646 - protein, 18 aa, Artificial Sequence
  Description of Artificial Sequence: Synthetic peptide
  N-term H or Acetyl
  MOD_RES (14)..(14): Ser or Phospho-Ser
  MOD_RES (16)..(16): Modified Cys
  See specification as filed for detailed description of substitutions and preferred embodiments
KKKTKKKRPQRADSNCFA

SEQ ID NO: 3647 - protein, 18 aa, Artificial Sequence
  Description of Artificial Sequence: Synthetic peptide
  N-term H or Acetyl
  MOD_RES (14)..(14): Ser or Phospho-Ser
  MOD_RES (16)..(16): Modified Cys
  See specification as filed for detailed description of substitutions and preferred embodiments
KKKTKKKRPQRADSNCFS

SEQ ID NO: 3648 - protein, 18 aa, Artificial Sequence
  Description of Artificial Sequence: Synthetic peptide
  N-term H or Acetyl
  MOD_RES (16)..(16): Modified Cys
  MOD_RES (18)..(18): Ser or Phospho-Ser
  See specification as filed for detailed description of substitutions and preferred embodiments
KKKTKKKRPQRADSDCFS

SEQ ID NO: 3649 - protein, 18 aa, Artificial Sequence
  Description of Artificial Sequence: Synthetic peptide
  N-term H or Acetyl
  MOD_RES (16)..(16): Modified Cys
  MOD_RES (18)..(18): Ser or Phospho-Ser
  See specification as filed for detailed description of substitutions and preferred embodiments
KKKTKKKRPQRADSNCFS

SEQ ID NO: 3650 - protein, 18 aa, Artificial Sequence
  Description of Artificial Sequence: Synthetic peptide
  N-term H or Acetyl
  MOD_RES (14)..(14): Ser or Phospho-Ser
  MOD_RES (16)..(16): Modified Cys
  See specification as filed for detailed description of substitutions and preferred embodiments
KKKTKKKRPQRAESDCFA

SEQ ID NO: 3651 - protein, 18 aa, Artificial Sequence
  Description of Artificial Sequence: Synthetic peptide
  N-term H or Acetyl
  MOD_RES (14)..(14): Ser or Phospho-Ser
  MOD_RES (16)..(16): Modified Cys
  See specification as filed for detailed description of substitutions and preferred embodiments
KKKTKKKRPQRAESDCFS

SEQ ID NO: 3652 - protein, 18 aa, Artificial Sequence
  Description of Artificial Sequence: Synthetic peptide
  N-term H or Acetyl
  MOD_RES (14)..(14): Ser or Phospho-Ser
  MOD_RES (16)..(16): Modified Cys
  See specification as filed for detailed description of substitutions and preferred embodiments
KKKTKKKRPQRAESNCFA

SEQ ID NO: 3653 - protein, 18 aa, Artificial Sequence
  Description of Artificial Sequence: Synthetic peptide
  N-term H or Acetyl
  MOD_RES (14)..(14): Ser or Phospho-Ser
  MOD_RES (16)..(16): Modified Cys
  See specification as filed for detailed description of substitutions and preferred embodiments
KKKTKKKRPQRAESNCFS

SEQ ID NO: 3654 - protein, 18 aa, Artificial Sequence
  Description of Artificial Sequence: Synthetic peptide
  N-term H or Acetyl
  MOD_RES (16)..(16): Modified Cys
  MOD_RES (18)..(18): Ser or Phospho-Ser
  See specification as filed for detailed description of substitutions and preferred embodiments
KKKTKKKRPQRAESDCFS

SEQ ID NO: 3655 - protein, 18 aa, Artificial Sequence
  Description of Artificial Sequence: Synthetic peptide
  N-term H or Acetyl
  MOD_RES (16)..(16): Modified Cys
  MOD_RES (18)..(18): Ser or Phospho-Ser
  See specification as filed for detailed description of substitutions and preferred embodiments
KKKTKKKRPQRAESNCFS

SEQ ID NO: 3656 - protein, 18 aa, Artificial Sequence
  Description of Artificial Sequence: Synthetic peptide
  N-term H or Acetyl
  MOD_RES (14)..(14): Ser or Phospho-Ser
  MOD_RES (16)..(16): Modified Cys
  See specification as filed for detailed description of substitutions and preferred embodiments
KKKTKKKRPQRAHSDCFA

SEQ ID NO: 3657 - protein, 18 aa, Artificial Sequence
  Description of Artificial Sequence: Synthetic peptide
  N-term H or Acetyl
  MOD_RES (14)..(14): Ser or Phospho-Ser
  MOD_RES (16)..(16): Modified Cys
  See specification as filed for detailed description of substitutions and preferred embodiments
KKKTKKKRPQRAHSDCFS

SEQ ID NO: 3658 - protein, 18 aa, Artificial Sequence
  Description of Artificial Sequence: Synthetic peptide
  N-term H or Acetyl
  MOD_RES (14)..(14): Ser or Phospho-Ser
  MOD_RES (16)..(16): Modified Cys
  See specification as filed for detailed description of substitutions and preferred embodiments
KKKTKKKRPQRAHSNCFA

SEQ ID NO: 3659 - protein, 18 aa, Artificial Sequence
  Description of Artificial Sequence: Synthetic peptide
  N-term H or Acetyl
  MOD_RES (14)..(14): Ser or Phospho-Ser
  MOD_RES (16)..(16): Modified Cys
  See specification as filed for detailed description of substitutions and preferred embodiments
KKKTKKKRPQRAHSNCFS

SEQ ID NO: 3660 - protein, 18 aa, Artificial Sequence
  Description of Artificial Sequence: Synthetic peptide
  N-term H or Acetyl
  MOD_RES (16)..(16): Modified Cys
  MOD_RES (18)..(18): Ser or Phospho-Ser
  See specification as filed for detailed description of substitutions and preferred embodiments
KKKTKKKRPQRAHSDCFS

SEQ ID NO: 3661 - protein, 18 aa, Artificial Sequence
  Description of Artificial Sequence: Synthetic peptide
  N-term H or Acetyl
  MOD_RES (16)..(16): Modified Cys
  MOD_RES (18)..(18): Ser or Phospho-Ser
  See specification as filed for detailed description of substitutions and preferred embodiments
KKKTKKKRPQRAHSNCFS

SEQ ID NO: 3662 - protein, 18 aa, Artificial Sequence
  Description of Artificial Sequence: Synthetic peptide
  N-term H or Acetyl
  MOD_RES (14)..(14): Ser or Phospho-Ser
  MOD_RES (16)..(16): Modified Cys
  See specification as filed for detailed description of substitutions and preferred embodiments
KKKTKKKRPQRATSDCFA

SEQ ID NO: 3663 - protein, 18 aa, Artificial Sequence
  Description of Artificial Sequence: Synthetic peptide
  N-term H or Acetyl
  MOD_RES (14)..(14): Ser or Phospho-Ser
  MOD_RES (16)..(16): Modified Cys
  See specification as filed for detailed description of substitutions and preferred embodiments
KKKTKKKRPQRATSDCFS

SEQ ID NO: 3664 - protein, 18 aa, Artificial Sequence
  Description of Artificial Sequence: Synthetic peptide
  N-term H or Acetyl
  MOD_RES (14)..(14): Ser or Phospho-Ser
  MOD_RES (16)..(16): Modified Cys
  See specification as filed for detailed description of substitutions and preferred embodiments
KKKTKKKRPQRATSNCFA

SEQ ID NO: 3665 - protein, 18 aa, Artificial Sequence
  Description of Artificial Sequence: Synthetic peptide
  N-term H or Acetyl
  MOD_RES (14)..(14): Ser or Phospho-Ser
  MOD_RES (16)..(16): Modified Cys
  See specification as filed for detailed description of substitutions and preferred embodiments
KKKTKKKRPQRATSNCFS

SEQ ID NO: 3666 - protein, 18 aa, Artificial Sequence
  Description of Artificial Sequence: Synthetic peptide
  N-term H or Acetyl
  MOD_RES (16)..(16): Modified Cys
  MOD_RES (18)..(18): Ser or Phospho-Ser
  See specification as filed for detailed description of substitutions and preferred embodiments
KKKTKKKRPQRATSDCFS

SEQ ID NO: 3667 - protein, 18 aa, Artificial Sequence
  Description of Artificial Sequence: Synthetic peptide
  N-term H or Acetyl
  MOD_RES (16)..(16): Modified Cys
  MOD_RES (18)..(18): Ser or Phospho-Ser
  See specification as filed for detailed description of substitutions and preferred embodiments
KKKTKKKRPQRATSNCFS

SEQ ID NO: 3668 - protein, 18 aa, Artificial Sequence
  Description of Artificial Sequence: Synthetic peptide
  N-term H or Acetyl
  MOD_RES (11)..(11): Thr or Phospho-Thr
  MOD_RES (13)..(13): Modified Cys
  See specification as filed for detailed description of substitutions and preferred embodiments
KKKTPVVSVATPCLPGQG

SEQ ID NO: 3669 - protein, 18 aa, Artificial Sequence
  Description of Artificial Sequence: Synthetic peptide
  N-term H or Acetyl
  MOD_RES (14)..(14): Ser or Phospho-Ser
  MOD_RES (16)..(16): Modified Cys
  See specification as filed for detailed description of substitutions and preferred embodiments
KKKTRKKRPQRADSDCFA

SEQ ID NO: 3670 - protein, 18 aa, Artificial Sequence
  Description of Artificial Sequence: Synthetic peptide
  N-term H or Acetyl
  MOD_RES (14)..(14): Ser or Phospho-Ser
  MOD_RES (16)..(16): Modified Cys
  See specification as filed for detailed description of substitutions and preferred embodiments
KKKTRKKRPQRADSDCFS

SEQ ID NO: 3671 - protein, 18 aa, Artificial Sequence
  Description of Artificial Sequence: Synthetic peptide
  N-term H or Acetyl
  MOD_RES (14)..(14): Ser or Phospho-Ser
  MOD_RES (16)..(16): Modified Cys
  See specification as filed for detailed description of substitutions and preferred embodiments
KKKTRKKRPQRADSNCFA

SEQ ID NO: 3672 - protein, 18 aa, Artificial Sequence
  Description of Artificial Sequence: Synthetic peptide
  N-term H or Acetyl
  MOD_RES (14)..(14): Ser or Phospho-Ser
  MOD_RES (16)..(16): Modified Cys
  See specification as filed for detailed description of substitutions and preferred embodiments
KKKTRKKRPQRADSNCFS

SEQ ID NO: 3673 - protein, 18 aa, Artificial Sequence
  Description of Artificial Sequence: Synthetic peptide
  N-term H or Acetyl
  MOD_RES (16)..(16): Modified Cys
  MOD_RES (18)..(18): Ser or Phospho-Ser
  See specification as filed for detailed description of substitutions and preferred embodiments
KKKTRKKRPQRADSDCFS

SEQ ID NO: 3674 - protein, 18 aa, Artificial Sequence
  Description of Artificial Sequence: Synthetic peptide
  N-term H or Acetyl
  MOD_RES (16)..(16): Modified Cys
  MOD_RES (18)..(18): Ser or Phospho-Ser
  See specification as filed for detailed description of substitutions and preferred embodiments
KKKTRKKRPQRADSNCFS

SEQ ID NO: 3675 - protein, 18 aa, Artificial Sequence
  Description of Artificial Sequence: Synthetic peptide
  N-term H or Acetyl
  MOD_RES (14)..(14): Ser or Phospho-Ser
  MOD_RES (16)..(16): Modified Cys
  See specification as filed for detailed description of substitutions and preferred embodiments
KKKTRKKRPQRAESDCFA

SEQ ID NO: 3676 - protein, 18 aa, Artificial Sequence
  Description of Artificial Sequence: Synthetic peptide
  N-term H or Acetyl
  MOD_RES (14)..(14): Ser or Phospho-Ser
  MOD_RES (16)..(16): Modified Cys
  See specification as filed for detailed description of substitutions and preferred embodiments
KKKTRKKRPQRAESDCFS

SEQ ID NO: 3677 - protein, 18 aa, Artificial Sequence
  Description of Artificial Sequence: Synthetic peptide
  N-term H or Acetyl
  MOD_RES (14)..(14): Ser or Phospho-Ser
  MOD_RES (16)..(16): Modified Cys
  See specification as filed for detailed description of substitutions and preferred embodiments
KKKTRKKRPQRAESNCFA

SEQ ID NO: 3678 - protein, 18 aa, Artificial Sequence
  Description of Artificial Sequence: Synthetic peptide
  N-term H or Acetyl
  MOD_RES (14)..(14): Ser or Phospho-Ser
  MOD_RES (16)..(16): Modified Cys
  See specification as filed for detailed description of substitutions and preferred embodiments
KKKTRKKRPQRAESNCFS

SEQ ID NO: 3679 - protein, 18 aa, Artificial Sequence
  Description of Artificial Sequence: Synthetic peptide
  N-term H or Acetyl
  MOD_RES (16)..(16): Modified Cys
  MOD_RES (18)..(18): Ser or Phospho-Ser
  See specification as filed for detailed description of substitutions and preferred embodiments
KKKTRKKRPQRAESDCFS

SEQ ID NO: 3680 - protein, 18 aa, Artificial Sequence
  Description of Artificial Sequence: Synthetic peptide
  N-term H or Acetyl
  MOD_RES (16)..(16): Modified Cys
  MOD_RES (18)..(18): Ser or Phospho-Ser
  See specification as filed for detailed description of substitutions and preferred embodiments
KKKTRKKRPQRAESNCFS

SEQ ID NO: 3681 - protein, 18 aa, Artificial Sequence
  Description of Artificial Sequence: Synthetic peptide
  N-term H or Acetyl
  MOD_RES (14)..(14): Ser or Phospho-Ser
  MOD_RES (16)..(16): Modified Cys
  See specification as filed for detailed description of substitutions and preferred embodiments
KKKTRKKRPQRAHSDCFA

SEQ ID NO: 3682 - protein, 18 aa, Artificial Sequence
  Description of Artificial Sequence: Synthetic peptide
  N-term H or Acetyl
  MOD_RES (14)..(14): Ser or Phospho-Ser
  MOD_RES (16)..(16): Modified Cys
  See specification as filed for detailed description of substitutions and preferred embodiments
KKKTRKKRPQRAHSDCFS

SEQ ID NO: 3683 - protein, 18 aa, Artificial Sequence
  Description of Artificial Sequence: Synthetic peptide
  N-term H or Acetyl
  MOD_RES (14)..(14): Ser or Phospho-Ser
  MOD_RES (16)..(16): Modified Cys
  See specification as filed for detailed description of substitutions and preferred embodiments
KKKTRKKRPQRAHSNCFA

SEQ ID NO: 3684 - protein, 18 aa, Artificial Sequence
  Description of Artificial Sequence: Synthetic peptide
  N-term H or Acetyl
  MOD_RES (14)..(14): Ser or Phospho-Ser
  MOD_RES (16)..(16): Modified Cys
  See specification as filed for detailed description of substitutions and preferred embodiments
KKKTRKKRPQRAHSNCFS

SEQ ID NO: 3685 - protein, 18 aa, Artificial Sequence
  Description of Artificial Sequence: Synthetic peptide
  N-term H or Acetyl
  MOD_RES (16)..(16): Modified Cys
  MOD_RES (18)..(18): Ser or Phospho-Ser
  See specification as filed for detailed description of substitutions and preferred embodiments
KKKTRKKRPQRAHSDCFS

SEQ ID NO: 3686 - protein, 18 aa, Artificial Sequence
  Description of Artificial Sequence: Synthetic peptide
  N-term H or Acetyl
  MOD_RES (16)..(16): Modified Cys
  MOD_RES (18)..(18): Ser or Phospho-Ser
  See specification as filed for detailed description of substitutions and preferred embodiments
KKKTRKKRPQRAHSNCFS

SEQ ID NO: 3687 - protein, 18 aa, Artificial Sequence
  Description of Artificial Sequence: Synthetic peptide
  N-term H or Acetyl
  MOD_RES (14)..(14): Ser or Phospho-Ser
  MOD_RES (16)..(16): Modified Cys
  See specification as filed for detailed description of substitutions and preferred embodiments
KKKTRKKRPQRATSDCFA

SEQ ID NO: 3688 - protein, 18 aa, Artificial Sequence
  Description of Artificial Sequence: Synthetic peptide
  N-term H or Acetyl
  MOD_RES (14)..(14): Ser or Phospho-Ser
  MOD_RES (16)..(16): Modified Cys
  See specification as filed for detailed description of substitutions and preferred embodiments
KKKTRKKRPQRATSDCFS

SEQ ID NO: 3689 - protein, 18 aa, Artificial Sequence
  Description of Artificial Sequence: Synthetic peptide
  N-term H or Acetyl
  MOD_RES (14)..(14): Ser or Phospho-Ser
  MOD_RES (16)..(16): Modified Cys
  See specification as filed for detailed description of substitutions and preferred embodiments
KKKTRKKRPQRATSNCFA

SEQ ID NO: 3690 - protein, 18 aa, Artificial Sequence
  Description of Artificial Sequence: Synthetic peptide
  N-term H or Acetyl
  MOD_RES (14)..(14): Ser or Phospho-Ser
  MOD_RES (16)..(16): Modified Cys
  See specification as filed for detailed description of substitutions and preferred embodiments
KKKTRKKRPQRATSNCFS

SEQ ID NO: 3691 - protein, 18 aa, Artificial Sequence
  Description of Artificial Sequence: Synthetic peptide
  N-term H or Acetyl
  MOD_RES (16)..(16): Modified Cys
  MOD_RES (18)..(18): Ser or Phospho-Ser
  See specification as filed for detailed description of substitutions and preferred embodiments
KKKTRKKRPQRATSDCFS

SEQ ID NO: 3692 - protein, 18 aa, Artificial Sequence
  Description of Artificial Sequence: Synthetic peptide
  N-term H or Acetyl
  MOD_RES (16)..(16): Modified Cys
  MOD_RES (18)..(18): Ser or Phospho-Ser
  See specification as filed for detailed description of substitutions and preferred embodiments
KKKTRKKRPQRATSNCFS

SEQ ID NO: 3693 - protein, 18 aa, Artificial Sequence
  Description of Artificial Sequence: Synthetic peptide
  N-term H or Acetyl
  MOD_RES (11)..(11): Thr or Phospho-Thr
  MOD_RES (13)..(13): Modified Cys
  See specification as filed for detailed description of substitutions and preferred embodiments
KKKTTGTKSNTPCSSVPS

SEQ ID NO: 3694 - protein, 18 aa, Artificial Sequence
  Description of Artificial Sequence: Synthetic peptide
  N-term H or Acetyl
  MOD_RES (13)..(13): Modified Cys
  MOD_RES (15)..(15): Ser or Phospho-Ser
  See specification as filed for detailed description of substitutions and preferred embodiments
KKKTTGTKSNTPCSSVPS

SEQ ID NO: 3695 - protein, 18 aa, Artificial Sequence
  Description of Artificial Sequence: Synthetic peptide
  N-term H or Acetyl
  MOD_RES (14)..(14): Ser or Phospho-Ser
  MOD_RES (16)..(16): Modified Cys
  See specification as filed for detailed description of substitutions and preferred embodiments
KKKTTKKRPQRADSDCFA

SEQ ID NO: 3696 - protein, 18 aa, Artificial Sequence
  Description of Artificial Sequence: Synthetic peptide
  N-term H or Acetyl
  MOD_RES (14)..(14): Ser or Phospho-Ser
  MOD_RES (16)..(16): Modified Cys
  See specification as filed for detailed description of substitutions and preferred embodiments
KKKTTKKRPQRADSDCFS

SEQ ID NO: 3697 - protein, 18 aa, Artificial Sequence
  Description of Artificial Sequence: Synthetic peptide
  N-term H or Acetyl
  MOD_RES (14)..(14): Ser or Phospho-Ser
  MOD_RES (16)..(16): Modified Cys
  See specification as filed for detailed description of substitutions and preferred embodiments
KKKTTKKRPQRADSNCFA

SEQ ID NO: 3698 - protein, 18 aa, Artificial Sequence
  Description of Artificial Sequence: Synthetic peptide
  N-term H or Acetyl
  MOD_RES (14)..(14): Ser or Phospho-Ser
  MOD_RES (16)..(16): Modified Cys
  See specification as filed for detailed description of substitutions and preferred embodiments
KKKTTKKRPQRADSNCFS

SEQ ID NO: 3699 - protein, 18 aa, Artificial Sequence
  Description of Artificial Sequence: Synthetic peptide
  N-term H or Acetyl
  MOD_RES (16)..(16): Modified Cys
  MOD_RES (18)..(18): Ser or Phospho-Ser
  See specification as filed for detailed description of substitutions and preferred embodiments
KKKTTKKRPQRADSDCFS

SEQ ID NO: 3700 - protein, 18 aa, Artificial Sequence
  Description of Artificial Sequence: Synthetic peptide
  N-term H or Acetyl
  MOD_RES (16)..(16): Modified Cys
  MOD_RES (18)..(18): Ser or Phospho-Ser
  See specification as filed for detailed description of substitutions and preferred embodiments
KKKTTKKRPQRADSNCFS

SEQ ID NO: 3701 - protein, 18 aa, Artificial Sequence
  Description of Artificial Sequence: Synthetic peptide
  N-term H or Acetyl
  MOD_RES (14)..(14): Ser or Phospho-Ser
  MOD_RES (16)..(16): Modified Cys
  See specification as filed for detailed description of substitutions and preferred embodiments
KKKTTKKRPQRAESDCFA

SEQ ID NO: 3702 - protein, 18 aa, Artificial Sequence
  Description of Artificial Sequence: Synthetic peptide
  N-term H or Acetyl
  MOD_RES (14)..(14): Ser or Phospho-Ser
  MOD_RES (16)..(16): Modified Cys
  See specification as filed for detailed description of substitutions and preferred embodiments
KKKTTKKRPQRAESDCFS

SEQ ID NO: 3703 - protein, 18 aa, Artificial Sequence
  Description of Artificial Sequence: Synthetic peptide
  N-term H or Acetyl
  MOD_RES (14)..(14): Ser or Phospho-Ser
  MOD_RES (16)..(16): Modified Cys
  See specification as filed for detailed description of substitutions and preferred embodiments
KKKTTKKRPQRAESNCFA

SEQ ID NO: 3704 - protein, 18 aa, Artificial Sequence
  Description of Artificial Sequence: Synthetic peptide
  N-term H or Acetyl
  MOD_RES (14)..(14): Ser or Phospho-Ser
  MOD_RES (16)..(16): Modified Cys
  See specification as filed for detailed description of substitutions and preferred embodiments
KKKTTKKRPQRAESNCFS

SEQ ID NO: 3705 - protein, 18 aa, Artificial Sequence
  Description of Artificial Sequence: Synthetic peptide
  N-term H or Acetyl
  MOD_RES (16)..(16): Modified Cys
  MOD_RES (18)..(18): Ser or Phospho-Ser
  See specification as filed for detailed description of substitutions and preferred embodiments
KKKTTKKRPQRAESDCFS

SEQ ID NO: 3706 - protein, 18 aa, Artificial Sequence
  Description of Artificial Sequence: Synthetic peptide
  N-term H or Acetyl
  MOD_RES (16)..(16): Modified Cys
  MOD_RES (18)..(18): Ser or Phospho-Ser
  See specification as filed for detailed description of substitutions and preferred embodiments
KKKTTKKRPQRAESNCFS

SEQ ID NO: 3707 - protein, 18 aa, Artificial Sequence
  Description of Artificial Sequence: Synthetic peptide
  N-term H or Acetyl
  MOD_RES (14)..(14): Ser or Phospho-Ser
  MOD_RES (16)..(16): Modified Cys
  See specification as filed for detailed description of substitutions and preferred embodiments
KKKTTKKRPQRAHSDCFA

SEQ ID NO: 3708 - protein, 18 aa, Artificial Sequence
  Description of Artificial Sequence: Synthetic peptide
  N-term H or Acetyl
  MOD_RES (14)..(14): Ser or Phospho-Ser
  MOD_RES (16)..(16): Modified Cys
  See specification as filed for detailed description of substitutions and preferred embodiments
KKKTTKKRPQRAHSDCFS

SEQ ID NO: 3709 - protein, 18 aa, Artificial Sequence
  Description of Artificial Sequence: Synthetic peptide
  N-term H or Acetyl
  MOD_RES (14)..(14): Ser or Phospho-Ser
  MOD_RES (16)..(16): Modified Cys
  See specification as filed for detailed description of substitutions and preferred embodiments
KKKTTKKRPQRAHSNCFA

SEQ ID NO: 3710 - protein, 18 aa, Artificial Sequence
  Description of Artificial Sequence: Synthetic peptide
  N-term H or Acetyl
  MOD_RES (14)..(14): Ser or Phospho-Ser
  MOD_RES (16)..(16): Modified Cys
  See specification as filed for detailed description of substitutions and preferred embodiments
KKKTTKKRPQRAHSNCFS

SEQ ID NO: 3711 - protein, 18 aa, Artificial Sequence
  Description of Artificial Sequence: Synthetic peptide
  N-term H or Acetyl
  MOD_RES (16)..(16): Modified Cys
  MOD_RES (18)..(18): Ser or Phospho-Ser
  See specification as filed for detailed description of substitutions and preferred embodiments
KKKTTKKRPQRAHSDCFS

SEQ ID NO: 3712 - protein, 18 aa, Artificial Sequence
  Description of Artificial Sequence: Synthetic peptide
  N-term H or Acetyl
  MOD_RES (16)..(16): Modified Cys
  MOD_RES (18)..(18): Ser or Phospho-Ser
  See specification as filed for detailed description of substitutions and preferred embodiments
KKKTTKKRPQRAHSNCFS

SEQ ID NO: 3713 - protein, 18 aa, Artificial Sequence
  Description of Artificial Sequence: Synthetic peptide
  N-term H or Acetyl
  MOD_RES (14)..(14): Ser or Phospho-Ser
  MOD_RES (16)..(16): Modified Cys
  See specification as filed for detailed description of substitutions and preferred embodiments
KKKTTKKRPQRATSDCFA

SEQ ID NO: 3714 - protein, 18 aa, Artificial Sequence
  Description of Artificial Sequence: Synthetic peptide
  N-term H or Acetyl
  MOD_RES (14)..(14): Ser or Phospho-Ser
  MOD_RES (16)..(16): Modified Cys
  See specification as filed for detailed description of substitutions and preferred embodiments
KKKTTKKRPQRATSDCFS

SEQ ID NO: 3715 - protein, 18 aa, Artificial Sequence
  Description of Artificial Sequence: Synthetic peptide
  N-term H or Acetyl
  MOD_RES (14)..(14): Ser or Phospho-Ser
  MOD_RES (16)..(16): Modified Cys
  See specification as filed for detailed description of substitutions and preferred embodiments
KKKTTKKRPQRATSNCFA

SEQ ID NO: 3716 - protein, 18 aa, Artificial Sequence
  Description of Artificial Sequence: Synthetic peptide
  N-term H or Acetyl
  MOD_RES (14)..(14): Ser or Phospho-Ser
  MOD_RES (16)..(16): Modified Cys
  See specification as filed for detailed description of substitutions and preferred embodiments
KKKTTKKRPQRATSNCFS

SEQ ID NO: 3717 - protein, 18 aa, Artificial Sequence
  Description of Artificial Sequence: Synthetic peptide
  N-term H or Acetyl
  MOD_RES (16)..(16): Modified Cys
  MOD_RES (18)..(18): Ser or Phospho-Ser
  See specification as filed for detailed description of substitutions and preferred embodiments
KKKTTKKRPQRATSDCFS

SEQ ID NO: 3718 - protein, 18 aa, Artificial Sequence
  Description of Artificial Sequence: Synthetic peptide
  N-term H or Acetyl
  MOD_RES (16)..(16): Modified Cys
  MOD_RES (18)..(18): Ser or Phospho-Ser
  See specification as filed for detailed description of substitutions and preferred embodiments
KKKTTKKRPQRATSNCFS

SEQ ID NO: 3719 - protein, 18 aa, Artificial Sequence
  Description of Artificial Sequence: Synthetic peptide
  N-term H or Acetyl
  MOD_RES (11)..(11): Thr or Phospho-Thr
  MOD_RES (13)..(13): Modified Cys
  See specification as filed for detailed description of substitutions and preferred embodiments
KKKTTQNALQTPCYTPYY

SEQ ID NO: 3720 - protein, 18 aa, Artificial Sequence
  Description of Artificial Sequence: Synthetic peptide
  N-term H or Acetyl
  MOD_RES (13)..(13): Modified Cys
  MOD_RES (15)..(15): Thr or Phospho-Thr
  See specification as filed for detailed description of substitutions and preferred embodiments
KKKTTQNALQTPCYTPYY

SEQ ID NO: 3721 - protein, 18 aa, Artificial Sequence
  Description of Artificial Sequence: Synthetic peptide
  N-term H or Acetyl
  MOD_RES (11)..(11): Ser or Phospho-Ser
  MOD_RES (13)..(13): Modified Cys
  See specification as filed for detailed description of substitutions and preferred embodiments
KKKTTSSTPSSPCPFPTS

SEQ ID NO: 3722 - protein, 18 aa, Artificial Sequence
  Description of Artificial Sequence: Synthetic peptide
  N-term H or Acetyl
  MOD_RES (14)..(14): Ser or Phospho-Ser
  MOD_RES (16)..(16): Modified Cys
  See specification as filed for detailed description of substitutions and preferred embodiments
KKKTVKKRPQRADSDCFA

SEQ ID NO: 3723 - protein, 18 aa, Artificial Sequence
  Description of Artificial Sequence: Synthetic peptide
  N-term H or Acetyl
  MOD_RES (14)..(14): Ser or Phospho-Ser
  MOD_RES (16)..(16): Modified Cys
  See specification as filed for detailed description of substitutions and preferred embodiments
KKKTVKKRPQRADSDCFS

SEQ ID NO: 3724 - protein, 18 aa, Artificial Sequence
  Description of Artificial Sequence: Synthetic peptide
  N-term H or Acetyl
  MOD_RES (14)..(14): Ser or Phospho-Ser
  MOD_RES (16)..(16): Modified Cys
  See specification as filed for detailed description of substitutions and preferred embodiments
KKKTVKKRPQRADSNCFA

SEQ ID NO: 3725 - protein, 18 aa, Artificial Sequence
  Description of Artificial Sequence: Synthetic peptide
  N-term H or Acetyl
  MOD_RES (14)..(14): Ser or Phospho-Ser
  MOD_RES (16)..(16): Modified Cys
  See specification as filed for detailed description of substitutions and preferred embodiments
KKKTVKKRPQRADSNCFS

SEQ ID NO: 3726 - protein, 18 aa, Artificial Sequence
  Description of Artificial Sequence: Synthetic peptide
  N-term H or Acetyl
  MOD_RES (16)..(16): Modified Cys
  MOD_RES (18)..(18): Ser or Phospho-Ser
  See specification as filed for detailed description of substitutions and preferred embodiments
KKKTVKKRPQRADSDCFS

SEQ ID NO: 3727 - protein, 18 aa, Artificial Sequence
  Description of Artificial Sequence: Synthetic peptide
  N-term H or Acetyl
  MOD_RES (16)..(16): Modified Cys
  MOD_RES (18)..(18): Ser or Phospho-Ser
  See specification as filed for detailed description of substitutions and preferred embodiments
KKKTVKKRPQRADSNCFS

SEQ ID NO: 3728 - protein, 18 aa, Artificial Sequence
  Description of Artificial Sequence: Synthetic peptide
  N-term H or Acetyl
  MOD_RES (14)..(14): Ser or Phospho-Ser
  MOD_RES (16)..(16): Modified Cys
  See specification as filed for detailed description of substitutions and preferred embodiments
KKKTVKKRPQRAESDCFA

SEQ ID NO: 3729 - protein, 18 aa, Artificial Sequence
  Description of Artificial Sequence: Synthetic peptide
  N-term H or Acetyl
  MOD_RES (14)..(14): Ser or Phospho-Ser
  MOD_RES (16)..(16): Modified Cys
  See specification as filed for detailed description of substitutions and preferred embodiments
KKKTVKKRPQRAESDCFS

SEQ ID NO: 3730 - protein, 18 aa, Artificial Sequence
  Description of Artificial Sequence: Synthetic peptide
  N-term H or Acetyl
  MOD_RES (14)..(14): Ser or Phospho-Ser
  MOD_RES (16)..(16): Modified Cys
  See specification as filed for detailed description of substitutions and preferred embodiments
KKKTVKKRPQRAESNCFA

SEQ ID NO: 3731 - protein, 18 aa, Artificial Sequence
  Description of Artificial Sequence: Synthetic peptide
  N-term H or Acetyl
  MOD_RES (14)..(14): Ser or Phospho-Ser
  MOD_RES (16)..(16): Modified Cys
  See specification as filed for detailed description of substitutions and preferred embodiments
KKKTVKKRPQRAESNCFS

SEQ ID NO: 3732 - protein, 18 aa, Artificial Sequence
  Description of Artificial Sequence: Synthetic peptide
  N-term H or Acetyl
  MOD_RES (16)..(16): Modified Cys
  MOD_RES (18)..(18): Ser or Phospho-Ser
  See specification as filed for detailed description of substitutions and preferred embodiments
KKKTVKKRPQRAESDCFS

SEQ ID NO: 3733 - protein, 18 aa, Artificial Sequence
  Description of Artificial Sequence: Synthetic peptide
  N-term H or Acetyl
  MOD_RES (16)..(16): Modified Cys
  MOD_RES (18)..(18): Ser or Phospho-Ser
  See specification as filed for detailed description of substitutions and preferred embodiments
KKKTVKKRPQRAESNCFS

SEQ ID NO: 3734 - protein, 18 aa, Artificial Sequence
  Description of Artificial Sequence: Synthetic peptide
  N-term H or Acetyl
  MOD_RES (14)..(14): Ser or Phospho-Ser
  MOD_RES (16)..(16): Modified Cys
  See specification as filed for detailed description of substitutions and preferred embodiments
KKKTVKKRPQRAHSDCFA

SEQ ID NO: 3735 - protein, 18 aa, Artificial Sequence
  Description of Artificial Sequence: Synthetic peptide
  N-term H or Acetyl
  MOD_RES (14)..(14): Ser or Phospho-Ser
  MOD_RES (16)..(16): Modified Cys
  See specification as filed for detailed description of substitutions and preferred embodiments
KKKTVKKRPQRAHSDCFS

SEQ ID NO: 3736 - protein, 18 aa, Artificial Sequence
  Description of Artificial Sequence: Synthetic peptide
  N-term H or Acetyl
  MOD_RES (14)..(14): Ser or Phospho-Ser
  MOD_RES (16)..(16): Modified Cys
  See specification as filed for detailed description of substitutions and preferred embodiments
KKKTVKKRPQRAHSNCFA

SEQ ID NO: 3737 - protein, 18 aa, Artificial Sequence
  Description of Artificial Sequence: Synthetic peptide
  N-term H or Acetyl
  MOD_RES (14)..(14): Ser or Phospho-Ser
  MOD_RES (16)..(16): Modified Cys
  See specification as filed for detailed description of substitutions and preferred embodiments
KKKTVKKRPQRAHSNCFS

SEQ ID NO: 3738 - protein, 18 aa, Artificial Sequence
  Description of Artificial Sequence: Synthetic peptide
  N-term H or Acetyl
  MOD_RES (16)..(16): Modified Cys
  MOD_RES (18)..(18): Ser or Phospho-Ser
  See specification as filed for detailed description of substitutions and preferred embodiments
KKKTVKKRPQRAHSDCFS

SEQ ID NO: 3739 - protein, 18 aa, Artificial Sequence
  Description of Artificial Sequence: Synthetic peptide
  N-term H or Acetyl
  MOD_RES (16)..(16): Modified Cys
  MOD_RES (18)..(18): Ser or Phospho-Ser
  See specification as filed for detailed description of substitutions and preferred embodiments
KKKTVKKRPQRAHSNCFS

SEQ ID NO: 3740 - protein, 18 aa, Artificial Sequence
  Description of Artificial Sequence: Synthetic peptide
  N-term H or Acetyl
  MOD_RES (14)..(14): Ser or Phospho-Ser
  MOD_RES (16)..(16): Modified Cys
  See specification as filed for detailed description of substitutions and preferred embodiments
KKKTVKKRPQRATSDCFA

SEQ ID NO: 3741 - protein, 18 aa, Artificial Sequence
  Description of Artificial Sequence: Synthetic peptide
  N-term H or Acetyl
  MOD_RES (14)..(14): Ser or Phospho-Ser
  MOD_RES (16)..(16): Modified Cys
  See specification as filed for detailed description of substitutions and preferred embodiments
KKKTVKKRPQRATSDCFS

SEQ ID NO: 3742 - protein, 18 aa, Artificial Sequence
  Description of Artificial Sequence: Synthetic peptide
  N-term H or Acetyl
  MOD_RES (14)..(14): Ser or Phospho-Ser
  MOD_RES (16)..(16): Modified Cys
  See specification as filed for detailed description of substitutions and preferred embodiments
KKKTVKKRPQRATSNCFA

SEQ ID NO: 3743 - protein, 18 aa, Artificial Sequence
  Description of Artificial Sequence: Synthetic peptide
  N-term H or Acetyl
  MOD_RES (14)..(14): Ser or Phospho-Ser
  MOD_RES (16)..(16): Modified Cys
  See specification as filed for detailed description of substitutions and preferred embodiments
KKKTVKKRPQRATSNCFS

SEQ ID NO: 3744 - protein, 18 aa, Artificial Sequence
  Description of Artificial Sequence: Synthetic peptide
  N-term H or Acetyl
  MOD_RES (16)..(16): Modified Cys
  MOD_RES (18)..(18): Ser or Phospho-Ser
  See specification as filed for detailed description of substitutions and preferred embodiments
KKKTVKKRPQRATSDCFS

SEQ ID NO: 3745 - protein, 18 aa, Artificial Sequence
  Description of Artificial Sequence: Synthetic peptide
  N-term H or Acetyl
  MOD_RES (16)..(16): Modified Cys
  MOD_RES (18)..(18): Ser or Phospho-Ser
  See specification as filed for detailed description of substitutions and preferred embodiments
KKKTVKKRPQRATSNCFS

SEQ ID NO: 3746 - protein, 18 aa, Artificial Sequence
  Description of Artificial Sequence: Synthetic peptide
  N-term H or Acetyl
  MOD_RES (11)..(11): Ser or Phospho-Ser
  MOD_RES (13)..(13): Modified Cys
  See specification as filed for detailed description of substitutions and preferred embodiments
KKKTVNQSLLSPCVLEVD

SEQ ID NO: 3747 - protein, 19 aa, Artificial Sequence
  Description of Artificial Sequence: Synthetic peptide
  N-term H or Acetyl
  MOD_RES (8)..(8): Leu or Nle (i.e. isomer of Leucine)
  MOD_RES (12)..(12): Ser or Phospho-Ser
  MOD_RES (14)..(14): Modified Cys
  MOD_RES (17)..(17): Ser or Phospho-Ser
  See specification as filed for detailed description of substitutions and preferred embodiments
KKKVLTQLGSPSICSSSVS

SEQ ID NO: 3748 - protein, 19 aa, Artificial Sequence
  Description of Artificial Sequence: Synthetic peptide
  N-term H or Acetyl
  MOD_RES (8)..(8): Leu or Nle (i.e. isomer of Leucine)
  MOD_RES (14)..(14): Modified Cys
  MOD_RES (16)..(16): Ser or Phospho-Ser
  MOD_RES (17)..(17): Ser or Phospho-Ser
  See specification as filed for detailed description of substitutions and preferred embodiments
KKKVLTQLGSPSICSSSVS

SEQ ID NO: 3749 - protein, 18 aa, Artificial Sequence
  Description of Artificial Sequence: Synthetic peptide
  N-term H or Acetyl
  MOD_RES (9)..(9): Modified Cys
  MOD_RES (11)..(11): Ser or Phospho-Ser
  See specification as filed for detailed description of substitutions and preferred embodiments
KKKVPNGACSSPVGNGFV

SEQ ID NO: 3750 - protein, 18 aa, Artificial Sequence
  Description of Artificial Sequence: Synthetic peptide
  N-term H or Acetyl
  MOD_RES (11)..(11): Ser or Phospho-Ser
  MOD_RES (13)..(13): Modified Cys
  See specification as filed for detailed description of substitutions and preferred embodiments
KKKVPNGAGSSPCGNGFV

SEQ ID NO: 3751 - protein, 22 aa, Artificial Sequence
  Description of Artificial Sequence: Synthetic peptide
  N-term H or Acetyl
  MOD_RES (11)..(11): Leu or Nle (i.e. isomer of Leucine)
  MOD_RES (13)..(13): Modified Cys
  MOD_RES (15)..(15): Ser or Phospho-Ser
  See specification as filed for detailed description of substitutions and preferred embodiments
KKKVSGQLIDLMCNSFVGTRSY

SEQ ID NO: 3752 - protein, 22 aa, Artificial Sequence
  Description of Artificial Sequence: Synthetic peptide
  N-term H or Acetyl
  MOD_RES (13)..(13): Modified Cys
  MOD_RES (15)..(15): Ser or Phospho-Ser
  See specification as filed for detailed description of substitutions and preferred embodiments
KKKVSGQLIDAMCNSFVGTRSY

SEQ ID NO: 3753 - protein, 22 aa, Artificial Sequence
  Description of Artificial Sequence: Synthetic peptide
  N-term H or Acetyl
  MOD_RES (13)..(13): Modified Cys
  MOD_RES (15)..(15): Ser or Phospho-Ser
  See specification as filed for detailed description of substitutions and preferred embodiments
KKKVSGQLIDDMCNSFVGTRSY

SEQ ID NO: 3754 - protein, 22 aa, Artificial Sequence
  Description of Artificial Sequence: Synthetic peptide
  N-term H or Acetyl
  MOD_RES (13)..(13): Modified Cys
  MOD_RES (15)..(15): Ser or Phospho-Ser
  See specification as filed for detailed description of substitutions and preferred embodiments
KKKVSGQLIDEMCNSFVGTRSY

SEQ ID NO: 3755 - protein, 22 aa, Artificial Sequence
  Description of Artificial Sequence: Synthetic peptide
  N-term H or Acetyl
  MOD_RES (13)..(13): Modified Cys
  MOD_RES (15)..(15): Ser or Phospho-Ser
  See specification as filed for detailed description of substitutions and preferred embodiments
KKKVSGQLIDFMCNSFVGTRSY

SEQ ID NO: 3756 - protein, 22 aa, Artificial Sequence
  Description of Artificial Sequence: Synthetic peptide
  N-term H or Acetyl
  MOD_RES (13)..(13): Modified Cys
  MOD_RES (15)..(15): Ser or Phospho-Ser
  See specification as filed for detailed description of substitutions and preferred embodiments
KKKVSGQLIDGMCNSFVGTRSY

SEQ ID NO: 3757 - protein, 22 aa, Artificial Sequence
  Description of Artificial Sequence: Synthetic peptide
  N-term H or Acetyl
  MOD_RES (13)..(13): Modified Cys
  MOD_RES (15)..(15): Ser or Phospho-Ser
  See specification as filed for detailed description of substitutions and preferred embodiments
KKKVSGQLIDHMCNSFVGTRSY

SEQ ID NO: 3758 - protein, 22 aa, Artificial Sequence
  Description of Artificial Sequence: Synthetic peptide
  N-term H or Acetyl
  MOD_RES (13)..(13): Modified Cys
  MOD_RES (15)..(15): Ser or Phospho-Ser
  See specification as filed for detailed description of substitutions and preferred embodiments
KKKVSGQLIDIMCNSFVGTRSY

SEQ ID NO: 3759 - protein, 22 aa, Artificial Sequence
  Description of Artificial Sequence: Synthetic peptide
  N-term H or Acetyl
  MOD_RES (13)..(13): Modified Cys
  MOD_RES (15)..(15): Ser or Phospho-Ser
  See specification as filed for detailed description of substitutions and preferred embodiments
KKKVSGQLIDKMCNSFVGTRSY

SEQ ID NO: 3760 - protein, 22 aa, Artificial Sequence
  Description of Artificial Sequence: Synthetic peptide
  N-term H or Acetyl
  MOD_RES (13)..(13): Modified Cys
  MOD_RES (15)..(15): Ser or Phospho-Ser
  See specification as filed for detailed description of substitutions and preferred embodiments
KKKVSGQLIDLMCNSFVGTRSY

SEQ ID NO: 3761 - protein, 22 aa, Artificial Sequence
  Description of Artificial Sequence: Synthetic peptide
  N-term H or Acetyl
  MOD_RES (13)..(13): Modified Cys
  MOD_RES (15)..(15): Ser or Phospho-Ser
  See specification as filed for detailed description of substitutions and preferred embodiments
KKKVSGQLIDMMCNSFVGTRSY

SEQ ID NO: 3762 - protein, 22 aa, Artificial Sequence
  Description of Artificial Sequence: Synthetic peptide
  N-term H or Acetyl
  MOD_RES (13)..(13): Modified Cys
  MOD_RES (15)..(15): Ser or Phospho-Ser
  See specification as filed for detailed description of substitutions and preferred embodiments
KKKVSGQLIDNMCNSFVGTRSY

SEQ ID NO: 3763 - protein, 22 aa, Artificial Sequence
  Description of Artificial Sequence: Synthetic peptide
  N-term H or Acetyl
  MOD_RES (13)..(13): Modified Cys
  MOD_RES (15)..(15): Ser or Phospho-Ser
  See specification as filed for detailed description of substitutions and preferred embodiments
KKKVSGQLIDPMCNSFVGTRSY

SEQ ID NO: 3764 - protein, 22 aa, Artificial Sequence
  Description of Artificial Sequence: Synthetic peptide
  N-term H or Acetyl
  MOD_RES (13)..(13): Modified Cys
  MOD_RES (15)..(15): Ser or Phospho-Ser
  See specification as filed for detailed description of substitutions and preferred embodiments
KKKVSGQLIDQMCNSFVGTRSY

SEQ ID NO: 3765 - protein, 22 aa, Artificial Sequence
  Description of Artificial Sequence: Synthetic peptide
  N-term H or Acetyl
  MOD_RES (13)..(13): Modified Cys
  MOD_RES (15)..(15): Ser or Phospho-Ser
  See specification as filed for detailed description of substitutions and preferred embodiments
KKKVSGQLIDRMCNSFVGTRSY

SEQ ID NO: 3766 - protein, 22 aa, Artificial Sequence
  Description of Artificial Sequence: Synthetic peptide
  N-term H or Acetyl
  MOD_RES (11)..(11): Ser or Phospho-Ser
  MOD_RES (12)..(12): Leu or Nle (i.e. isomer of Leucine)
  MOD_RES (13)..(13): Modified Cys
  See specification as filed for detailed description of substitutions and preferred embodiments
KKKVSGQLIDSLCNSFVGTRSY

SEQ ID NO: 3767 - protein, 18 aa, Artificial Sequence
  Description of Artificial Sequence: Synthetic peptide
  N-term H or Acetyl
  MOD_RES (11)..(11): Ser or Phospho-Ser
  MOD_RES (12)..(12): Leu or Nle (i.e. isomer of Leucine)
  MOD_RES (13)..(13): Modified Cys
  See specification as filed for detailed description of substitutions and preferred embodiments
KKKVSGQLIDSLCNSFVG

SEQ ID NO: 3768 - protein, 22 aa, Artificial Sequence
  Description of Artificial Sequence: Synthetic peptide
  N-term H or Acetyl
  MOD_RES (11)..(11): Ser or Phospho-Ser
  MOD_RES (13)..(13): Modified Cys
  See specification as filed for detailed description of substitutions and preferred embodiments
KKKVSGQLIDSMCNAFVGTRSY

SEQ ID NO: 3769 - protein, 22 aa, Artificial Sequence
  Description of Artificial Sequence: Synthetic peptide
  N-term H or Acetyl
  MOD_RES (11)..(11): Ser or Phospho-Ser
  MOD_RES (13)..(13): Modified Cys
  See specification as filed for detailed description of substitutions and preferred embodiments
KKKVSGQLIDSMCNDFVGTRSY

SEQ ID NO: 3770 - protein, 22 aa, Artificial Sequence
  Description of Artificial Sequence: Synthetic peptide
  N-term H or Acetyl
  MOD_RES (11)..(11): Ser or Phospho-Ser
  MOD_RES (13)..(13): Modified Cys
  See specification as filed for detailed description of substitutions and preferred embodiments
KKKVSGQLIDSMCNEFVGTRSY

SEQ ID NO: 3771 - protein, 22 aa, Artificial Sequence
  Description of Artificial Sequence: Synthetic peptide
  N-term H or Acetyl
  MOD_RES (11)..(11): Ser or Phospho-Ser
  MOD_RES (13)..(13): Modified Cys
  See specification as filed for detailed description of substitutions and preferred embodiments
KKKVSGQLIDSMCNFFVGTRSY

SEQ ID NO: 3772 - protein, 22 aa, Artificial Sequence
  Description of Artificial Sequence: Synthetic peptide
  N-term H or Acetyl
  MOD_RES (11)..(11): Ser or Phospho-Ser
  MOD_RES (13)..(13): Modified Cys
  See specification as filed for detailed description of substitutions and preferred embodiments
KKKVSGQLIDSMCNIFVGTRSY

SEQ ID NO: 3773 - protein, 22 aa, Artificial Sequence
  Description of Artificial Sequence: Synthetic peptide
  N-term H or Acetyl
  MOD_RES (11)..(11): Ser or Phospho-Ser
  MOD_RES (13)..(13): Modified Cys
  See specification as filed for detailed description of substitutions and preferred embodiments
KKKVSGQLIDSMCNPFVGTRSY

SEQ ID NO: 3774 - protein, 22 aa, Artificial Sequence
  Description of Artificial Sequence: Synthetic peptide
  N-term H or Acetyl
  MOD_RES (11)..(11): Ser or Phospho-Ser
  MOD_RES (13)..(13): Modified Cys
  MOD_RES (15)..(15): Ser or Phospho-Ser
  See specification as filed for detailed description of substitutions and preferred embodiments
KKKVSGQLIDSMCNSFVGTRSY

SEQ ID NO: 3775 - protein, 21 aa, Artificial Sequence
  Description of Artificial Sequence: Synthetic peptide
  N-term H or Acetyl
  MOD_RES (11)..(11): Ser or Phospho-Ser
  MOD_RES (13)..(13): Modified Cys
  See specification as filed for detailed description of substitutions and preferred embodiments
KKKVSGQLIDSMCNSFVGTRS

SEQ ID NO: 3776 - protein, 22 aa, Artificial Sequence
  Description of Artificial Sequence: Synthetic peptide
  N-term H or Acetyl
  MOD_RES (12)..(12): Leu or Nle (i.e. isomer of Leucine)
  MOD_RES (13)..(13): Modified Cys
  MOD_RES (15)..(15): Ser or Phospho-Ser
  See specification as filed for detailed description of substitutions and preferred embodiments
KKKVSGQLIDSLCNSFVGTRSY

SEQ ID NO: 3777 - protein, 18 aa, Artificial Sequence
  Description of Artificial Sequence: Synthetic peptide
  N-term H or Acetyl
  MOD_RES (12)..(12): Leu or Nle (i.e. isomer of Leucine)
  MOD_RES (13)..(13): Modified Cys
  MOD_RES (15)..(15): Ser or Phospho-Ser
  See specification as filed for detailed description of substitutions and preferred embodiments
KKKVSGQLIDSLCNSFVG

SEQ ID NO: 3778 - protein, 22 aa, Artificial Sequence
  Description of Artificial Sequence: Synthetic peptide
  N-term H or Acetyl
  MOD_RES (15)..(15): Ser or Phospho-Ser
  MOD_RES (17)..(17): Modified Cys
  See specification as filed for detailed description of substitutions and preferred embodiments
KKKVSGQLIDSMANSFCGTRSY

SEQ ID NO: 3779 - protein, 22 aa, Artificial Sequence
  Description of Artificial Sequence: Synthetic peptide
  N-term H or Acetyl
  MOD_RES (17)..(17): Modified Cys
  MOD_RES (19)..(19): Thr or Phospho-Thr
  See specification as filed for detailed description of substitutions and preferred embodiments
KKKVSGQLIDSMANSFCGTRSY

SEQ ID NO: 3780 - protein, 21 aa, Artificial Sequence
  Description of Artificial Sequence: Synthetic peptide
  N-term H or Acetyl
  MOD_RES (13)..(13): Modified Cys
  MOD_RES (15)..(15): Ser or Phospho-Ser
  See specification as filed for detailed description of substitutions and preferred embodiments
KKKVSGQLIDSMCNSFVGTRS

SEQ ID NO: 3781 - protein, 22 aa, Artificial Sequence
  Description of Artificial Sequence: Synthetic peptide
  N-term H or Acetyl
  MOD_RES (13)..(13): Modified Cys
  MOD_RES (15)..(15): Ser or Phospho-Ser
  See specification as filed for detailed description of substitutions and preferred embodiments
KKKVSGQLIDVMCNSFVGTRSY

SEQ ID NO: 3782 - protein, 22 aa, Artificial Sequence
  Description of Artificial Sequence: Synthetic peptide
  N-term H or Acetyl
  MOD_RES (13)..(13): Modified Cys
  MOD_RES (15)..(15): Ser or Phospho-Ser
  See specification as filed for detailed description of substitutions and preferred embodiments
KKKVSGQLIDWMCNSFVGTRSY

SEQ ID NO: 3783 - protein, 23 aa, Artificial Sequence
  Description of Artificial Sequence: Synthetic peptide
  N-term H or Acetyl
  MOD_RES (14)..(14): Ser or Phospho-Ser
  MOD_RES (15)..(15): Leu or Nle (i.e. isomer of Leucine)
  MOD_RES (16)..(16): Modified Cys
  See specification as filed for detailed description of substitutions and preferred embodiments
KKKVSRSGLYRSPSLCENLNRPR

SEQ ID NO: 3784 - protein, 22 aa, Artificial Sequence
  Description of Artificial Sequence: Synthetic peptide
  N-term H or Acetyl
  MOD_RES (14)..(14): Ser or Phospho-Ser
  MOD_RES (16)..(16): Modified Cys
  See specification as filed for detailed description of substitutions and preferred embodiments
KKKVSRSGLYRSPSMCENLNRP

SEQ ID NO: 3785 - protein, 21 aa, Artificial Sequence
  Description of Artificial Sequence: Synthetic peptide
  N-term H or Acetyl
  MOD_RES (14)..(14): Ser or Phospho-Ser
  MOD_RES (16)..(16): Modified Cys
  See specification as filed for detailed description of substitutions and preferred embodiments
KKKVSRSGLYRSPSMCENLNR

SEQ ID NO: 3786 - protein, 25 aa, Artificial Sequence
  Description of Artificial Sequence: Synthetic peptide
  N-term H or Acetyl
  MOD_RES (17)..(17): Modified Cys
  MOD_RES (19)..(19): Ser or Phospho-Ser
  See specification as filed for detailed description of substitutions and preferred embodiments
KKLGEDQAEEISDDLLCDSLSDEDE

SEQ ID NO: 3787 - protein, 25 aa, Artificial Sequence
  Description of Artificial Sequence: Synthetic peptide
  N-term H or Acetyl
  MOD_RES (19)..(19): Ser or Phospho-Ser
  MOD_RES (21)..(21): Modified Cys
  See specification as filed for detailed description of substitutions and preferred embodiments
KKLGEDQAEEISDDLLEDSLCDEDE

SEQ ID NO: 3788 - protein, 12 aa, Artificial Sequence
  Description of Artificial Sequence: Synthetic peptide
  N-term H or Acetyl
  MOD_RES (6)..(6): Modified Cys
  MOD_RES (8)..(8): Ser or Phospho-Ser
  See specification as filed for detailed description of substitutions and preferred embodiments
KKLNRCLSFAEG

SEQ ID NO: 3789 - protein, 13 aa, Artificial Sequence
  Description of Artificial Sequence: Synthetic peptide
  N-term H or Acetyl
  MOD_RES (6)..(6): Modified Cys
  MOD_RES (8)..(8): Ser or Phospho-Ser
  See specification as filed for detailed description of substitutions and preferred embodiments
KKLNRCLSFAEPG

SEQ ID NO: 3790 - protein, 15 aa, Artificial Sequence
  Description of Artificial Sequence: Synthetic peptide
  N-term H or Acetyl
  MOD_RES (8)..(8): Thr or Phospho-Thr
  MOD_RES (10)..(10): Modified Cys
  See specification as filed for detailed description of substitutions and preferred embodiments
KKLPQRATSCVFAMF

SEQ ID NO: 3791 - protein, 16 aa, Artificial Sequence
  Description of Artificial Sequence: Synthetic peptide
  N-term H or Acetyl
  MOD_RES (8)..(8): Modified Cys
  MOD_RES (10)..(10): Ser or Phospho-Ser
  See specification as filed for detailed description of substitutions and preferred embodiments
KKLSTPVCLSPGPQKP

SEQ ID NO: 3792 - protein, 16 aa, Artificial Sequence
  Description of Artificial Sequence: Synthetic peptide
  N-term H or Acetyl
  MOD_RES (10)..(10): Ser or Phospho-Ser
  MOD_RES (12)..(12): Modified Cys
  See specification as filed for detailed description of substitutions and preferred embodiments
KKLSTPVVLSPCPQKP

SEQ ID NO: 3793 - protein, 16 aa, Artificial Sequence
  Description of Artificial Sequence: Synthetic peptide
  N-term H or Acetyl
  MOD_RES (10)..(10): Ser or Phospho-Ser
  MOD_RES (13)..(13): Modified Cys
  See specification as filed for detailed description of substitutions and preferred embodiments
KKLSTPVVLSPGCQKP

SEQ ID NO: 3794 - protein, 15 aa, Artificial Sequence
  Description of Artificial Sequence: Synthetic peptide
  N-term H or Acetyl
  MOD_RES (8)..(8): Thr or Phospho-Thr
  MOD_RES (10)..(10): Modified Cys
  See specification as filed for detailed description of substitutions and preferred embodiments
KKNPQRATSCVFAMF

SEQ ID NO: 3795 - protein, 18 aa, Artificial Sequence
  Description of Artificial Sequence: Synthetic peptide
  N-term H or Acetyl
  MOD_RES (6)..(6): Leu or Nle (i.e. isomer of Leucine)
  MOD_RES (8)..(8): Modified Cys
  MOD_RES (10)..(10): Thr or Phospho-Thr
  See specification as filed for detailed description of substitutions and preferred embodiments
KKNVHLVCTTLPVDSRKK

SEQ ID NO: 3796 - protein, 15 aa, Artificial Sequence
  Description of Artificial Sequence: Synthetic peptide
  N-term H or Acetyl
  MOD_RES (8)..(8): Thr or Phospho-Thr
  MOD_RES (10)..(10): Modified Cys
  See specification as filed for detailed description of substitutions and preferred embodiments
KKPPQRATSCVFAMF

SEQ ID NO: 3797 - protein, 17 aa, Artificial Sequence
  Description of Artificial Sequence: Synthetic peptide
  N-term H or Acetyl
  MOD_RES (10)..(10): Ser or Phospho-Ser
  MOD_RES (12)..(12): Modified Cys
  See specification as filed for detailed description of substitutions and preferred embodiments
KKPSVNPSISPCHGVAR

SEQ ID NO: 3798 - protein, 15 aa, Artificial Sequence
  Description of Artificial Sequence: Synthetic peptide
  N-term H or Acetyl
  MOD_RES (8)..(8): Thr or Phospho-Thr
  MOD_RES (10)..(10): Modified Cys
  See specification as filed for detailed description of substitutions and preferred embodiments
KKQPQRATSCVFAMF

SEQ ID NO: 3799 - protein, 15 aa, Artificial Sequence
  Description of Artificial Sequence: Synthetic peptide
  N-term H or Acetyl
  MOD_RES (4)..(4): Leu or Nle (i.e. isomer of Leucine)
  MOD_RES (8)..(8): Thr or Phospho-Thr
  MOD_RES (10)..(10): Modified Cys
  See specification as filed for detailed description of substitutions and preferred embodiments
KKRLQRATSCVFAMF

SEQ ID NO: 3800 - protein, 13 aa, Artificial Sequence
  Description of Artificial Sequence: Synthetic peptide
  N-term H or Acetyl
  MOD_RES (6)..(6): Modified Cys
  MOD_RES (8)..(8): Thr or Phospho-Thr
  See specification as filed for detailed description of substitutions and preferred embodiments
KKRAACATSDVFA

SEQ ID NO: 3801 - protein, 13 aa, Artificial Sequence
  Description of Artificial Sequence: Synthetic peptide
  N-term H or Acetyl
  MOD_RES (8)..(8): Thr or Phospho-Thr
  MOD_RES (10)..(10): Modified Cys
  See specification as filed for detailed description of substitutions and preferred embodiments
KKRAARATSCVFA

SEQ ID NO: 3802 - protein, 13 aa, Artificial Sequence
  Description of Artificial Sequence: Synthetic peptide
  N-term H or Acetyl
  MOD_RES (9)..(9): Ser or Phospho-Ser
  MOD_RES (11)..(11): Modified Cys
  See specification as filed for detailed description of substitutions and preferred embodiments
KKRAARATSDCFA

SEQ ID NO: 3803 - protein, 13 aa, Artificial Sequence
  Description of Artificial Sequence: Synthetic peptide
  N-term H or Acetyl
  MOD_RES (7)..(7): Modified Cys
  MOD_RES (9)..(9): Ser or Phospho-Ser
  See specification as filed for detailed description of substitutions and preferred embodiments
KKRAARCTSDVFA

SEQ ID NO: 3804 - protein, 15 aa, Artificial Sequence
  Description of Artificial Sequence: Synthetic peptide
  N-term H or Acetyl
  MOD_RES (8)..(8): Thr or Phospho-Thr
  MOD_RES (10)..(10): Modified Cys
  See specification as filed for detailed description of substitutions and preferred embodiments
KKRDQRATSCVFAMF

SEQ ID NO: 3805 - protein, 15 aa, Artificial Sequence
  Description of Artificial Sequence: Synthetic peptide
  N-term H or Acetyl
  MOD_RES (8)..(8): Thr or Phospho-Thr
  MOD_RES (10)..(10): Modified Cys
  See specification as filed for detailed description of substitutions and preferred embodiments
KKREQRATSCVFAMF

SEQ ID NO: 3806 - protein, 15 aa, Artificial Sequence
  Description of Artificial Sequence: Synthetic peptide
  N-term H or Acetyl
  MOD_RES (8)..(8): Thr or Phospho-Thr
  MOD_RES (10)..(10): Modified Cys
  See specification as filed for detailed description of substitutions and preferred embodiments
KKRFQRATSCVFAMF

SEQ ID NO: 3807 - protein, 15 aa, Artificial Sequence
  Description of Artificial Sequence: Synthetic peptide
  N-term H or Acetyl
  MOD_RES (8)..(8): Thr or Phospho-Thr
  MOD_RES (10)..(10): Modified Cys
  See specification as filed for detailed description of substitutions and preferred embodiments
KKRGQRATSCVFAMF

SEQ ID NO: 3808 - protein, 15 aa, Artificial Sequence
  Description of Artificial Sequence: Synthetic peptide
  N-term H or Acetyl
  MOD_RES (8)..(8): Thr or Phospho-Thr
  MOD_RES (10)..(10): Modified Cys
  See specification as filed for detailed description of substitutions and preferred embodiments
KKRHQRATSCVFAMF

SEQ ID NO: 3809 - protein, 15 aa, Artificial Sequence
  Description of Artificial Sequence: Synthetic peptide
  N-term H or Acetyl
  MOD_RES (8)..(8): Thr or Phospho-Thr
  MOD_RES (10)..(10): Modified Cys
  See specification as filed for detailed description of substitutions and preferred embodiments
KKRIQRATSCVFAMF

SEQ ID NO: 3810 - protein, 15 aa, Artificial Sequence
  Description of Artificial Sequence: Synthetic peptide
  N-term H or Acetyl
  MOD_RES (8)..(8): Thr or Phospho-Thr
  MOD_RES (10)..(10): Modified Cys
  See specification as filed for detailed description of substitutions and preferred embodiments
KKRKQRATSCVFAMF

SEQ ID NO: 3811 - protein, 15 aa, Artificial Sequence
  Description of Artificial Sequence: Synthetic peptide
  N-term H or Acetyl
  MOD_RES (8)..(8): Thr or Phospho-Thr
  MOD_RES (10)..(10): Modified Cys
  See specification as filed for detailed description of substitutions and preferred embodiments
KKRLQRATSCVFAMF

SEQ ID NO: 3812 - protein, 15 aa, Artificial Sequence
  Description of Artificial Sequence: Synthetic peptide
  N-term H or Acetyl
  MOD_RES (8)..(8): Thr or Phospho-Thr
  MOD_RES (10)..(10): Modified Cys
  See specification as filed for detailed description of substitutions and preferred embodiments
KKRNQRATSCVFAMF

SEQ ID NO: 3813 - protein, 15 aa, Artificial Sequence
  Description of Artificial Sequence: Synthetic peptide
  N-term H or Acetyl
  MOD_RES (5)..(5): Leu or Nle (i.e. isomer of Leucine)
  MOD_RES (8)..(8): Thr or Phospho-Thr
  MOD_RES (10)..(10): Modified Cys
  See specification as filed for detailed description of substitutions and preferred embodiments
KKRPLRATSCVFAMF

SEQ ID NO: 3814 - protein, 15 aa, Artificial Sequence
  Description of Artificial Sequence: Synthetic peptide
  N-term H or Acetyl
  MOD_RES (8)..(8): Thr or Phospho-Thr
  MOD_RES (10)..(10): Modified Cys
  See specification as filed for detailed description of substitutions and preferred embodiments
KKRPDRATSCVFAMF

SEQ ID NO: 3815 - protein, 15 aa, Artificial Sequence
  Description of Artificial Sequence: Synthetic peptide
  N-term H or Acetyl
  MOD_RES (8)..(8): Thr or Phospho-Thr
  MOD_RES (10)..(10): Modified Cys
  See specification as filed for detailed description of substitutions and preferred embodiments
KKRPERATSCVFAMF

SEQ ID NO: 3816 - protein, 15 aa, Artificial Sequence
  Description of Artificial Sequence: Synthetic peptide
  N-term H or Acetyl
  MOD_RES (8)..(8): Thr or Phospho-Thr
  MOD_RES (10)..(10): Modified Cys
  See specification as filed for detailed description of substitutions and preferred embodiments
KKRPFRATSCVFAMF

SEQ ID NO: 3817 - protein, 15 aa, Artificial Sequence
  Description of Artificial Sequence: Synthetic peptide
  N-term H or Acetyl
  MOD_RES (8)..(8): Thr or Phospho-Thr
  MOD_RES (10)..(10): Modified Cys
  See specification as filed for detailed description of substitutions and preferred embodiments
KKRPGRATSCVFAMF

SEQ ID NO: 3818 - protein, 15 aa, Artificial Sequence
  Description of Artificial Sequence: Synthetic peptide
  N-term H or Acetyl
  MOD_RES (8)..(8): Thr or Phospho-Thr
  MOD_RES (10)..(10): Modified Cys
  See specification as filed for detailed description of substitutions and preferred embodiments
KKRPHRATSCVFAMF

SEQ ID NO: 3819 - protein, 15 aa, Artificial Sequence
  Description of Artificial Sequence: Synthetic peptide
  N-term H or Acetyl
  MOD_RES (8)..(8): Thr or Phospho-Thr
  MOD_RES (10)..(10): Modified Cys
  See specification as filed for detailed description of substitutions and preferred embodiments
KKRPIRATSCVFAMF

SEQ ID NO: 3820 - protein, 15 aa, Artificial Sequence
  Description of Artificial Sequence: Synthetic peptide
  N-term H or Acetyl
  MOD_RES (8)..(8): Thr or Phospho-Thr
  MOD_RES (10)..(10): Modified Cys
  See specification as filed for detailed description of substitutions and preferred embodiments
KKRPKRATSCVFAMF

SEQ ID NO: 3821 - protein, 15 aa, Artificial Sequence
  Description of Artificial Sequence: Synthetic peptide
  N-term H or Acetyl
  MOD_RES (8)..(8): Thr or Phospho-Thr
  MOD_RES (10)..(10): Modified Cys
  See specification as filed for detailed description of substitutions and preferred embodiments
KKRPLRATSCVFAMF

SEQ ID NO: 3822 - protein, 15 aa, Artificial Sequence
  Description of Artificial Sequence: Synthetic peptide
  N-term H or Acetyl
  MOD_RES (8)..(8): Thr or Phospho-Thr
  MOD_RES (10)..(10): Modified Cys
  See specification as filed for detailed description of substitutions and preferred embodiments
KKRPNRATSCVFAMF

SEQ ID NO: 3823 - protein, 15 aa, Artificial Sequence
  Description of Artificial Sequence: Synthetic peptide
  N-term H or Acetyl
  MOD_RES (8)..(8): Thr or Phospho-Thr
  MOD_RES (10)..(10): Modified Cys
  See specification as filed for detailed description of substitutions and preferred embodiments
KKRPPRATSCVFAMF

SEQ ID NO: 3824 - protein, 15 aa, Artificial Sequence
  Description of Artificial Sequence: Synthetic peptide
  N-term H or Acetyl
  MOD_RES (6)..(6): Leu or Nle (i.e. isomer of Leucine)
  MOD_RES (8)..(8): Thr or Phospho-Thr
  MOD_RES (10)..(10): Modified Cys
  See specification as filed for detailed description of substitutions and preferred embodiments
KKRPQLATSCVFAMF

SEQ ID NO: 3825 - protein, 15 aa, Artificial Sequence
  Description of Artificial Sequence: Synthetic peptide
  N-term H or Acetyl
  MOD_RES (8)..(8): Thr or Phospho-Thr
  MOD_RES (10)..(10): Modified Cys
  See specification as filed for detailed description of substitutions and preferred embodiments
KKRPQDATSCVFAMF

SEQ ID NO: 3826 - protein, 15 aa, Artificial Sequence
  Description of Artificial Sequence: Synthetic peptide
  N-term H or Acetyl
  MOD_RES (8)..(8): Thr or Phospho-Thr
  MOD_RES (10)..(10): Modified Cys
  See specification as filed for detailed description of substitutions and preferred embodiments
KKRPQEATSCVFAMF

SEQ ID NO: 3827 - protein, 15 aa, Artificial Sequence
  Description of Artificial Sequence: Synthetic peptide
  N-term H or Acetyl
  MOD_RES (8)..(8): Thr or Phospho-Thr
  MOD_RES (10)..(10): Modified Cys
  See specification as filed for detailed description of substitutions and preferred embodiments
KKRPQFATSCVFAMF

SEQ ID NO: 3828 - protein, 15 aa, Artificial Sequence
  Description of Artificial Sequence: Synthetic peptide
  N-term H or Acetyl
  MOD_RES (8)..(8): Thr or Phospho-Thr
  MOD_RES (10)..(10): Modified Cys
  See specification as filed for detailed description of substitutions and preferred embodiments
KKRPQGATSCVFAMF

SEQ ID NO: 3829 - protein, 15 aa, Artificial Sequence
  Description of Artificial Sequence: Synthetic peptide
  N-term H or Acetyl
  MOD_RES (8)..(8): Thr or Phospho-Thr
  MOD_RES (10)..(10): Modified Cys
  See specification as filed for detailed description of substitutions and preferred embodiments
KKRPQHATSCVFAMF

SEQ ID NO: 3830 - protein, 15 aa, Artificial Sequence
  Description of Artificial Sequence: Synthetic peptide
  N-term H or Acetyl
  MOD_RES (8)..(8): Thr or Phospho-Thr
  MOD_RES (10)..(10): Modified Cys
  See specification as filed for detailed description of substitutions and preferred embodiments
KKRPQIATSCVFAMF

SEQ ID NO: 3831 - protein, 15 aa, Artificial Sequence
  Description of Artificial Sequence: Synthetic peptide
  N-term H or Acetyl
  MOD_RES (8)..(8): Thr or Phospho-Thr
  MOD_RES (10)..(10): Modified Cys
  See specification as filed for detailed description of substitutions and preferred embodiments
KKRPQKATSCVFAMF

SEQ ID NO: 3832 - protein, 15 aa, Artificial Sequence
  Description of Artificial Sequence: Synthetic peptide
  N-term H or Acetyl
  MOD_RES (8)..(8): Thr or Phospho-Thr
  MOD_RES (10)..(10): Modified Cys
  See specification as filed for detailed description of substitutions and preferred embodiments
KKRPQLATSCVFAMF

SEQ ID NO: 3833 - protein, 15 aa, Artificial Sequence
  Description of Artificial Sequence: Synthetic peptide
  N-term H or Acetyl
  MOD_RES (8)..(8): Thr or Phospho-Thr
  MOD_RES (10)..(10): Modified Cys
  See specification as filed for detailed description of substitutions and preferred embodiments
KKRPQNATSCVFAMF

SEQ ID NO: 3834 - protein, 15 aa, Artificial Sequence
  Description of Artificial Sequence: Synthetic peptide
  N-term H or Acetyl
  MOD_RES (8)..(8): Thr or Phospho-Thr
  MOD_RES (10)..(10): Modified Cys
  See specification as filed for detailed description of substitutions and preferred embodiments
KKRPQPATSCVFAMF

SEQ ID NO: 3835 - protein, 15 aa, Artificial Sequence
  Description of Artificial Sequence: Synthetic peptide
  N-term H or Acetyl
  MOD_RES (8)..(8): Thr or Phospho-Thr
  MOD_RES (10)..(10): Modified Cys
  See specification as filed for detailed description of substitutions and preferred embodiments
KKRPQQATSCVFAMF

SEQ ID NO: 3836 - protein, 15 aa, Artificial Sequence
  Description of Artificial Sequence: Synthetic peptide
  N-term H or Acetyl
  MOD_RES (7)..(7): Leu or Nle (i.e. isomer of Leucine)
  MOD_RES (8)..(8): Thr or Phospho-Thr
  MOD_RES (10)..(10): Modified Cys
  See specification as filed for detailed description of substitutions and preferred embodiments
KKRPQRLTSCVFAMF

SEQ ID NO: 3837 - protein, 15 aa, Artificial Sequence
  Description of Artificial Sequence: Synthetic peptide
  N-term H or Acetyl
  MOD_RES (8)..(8): Thr or Phospho-Thr
  MOD_RES (9)..(9): Leu or Nle (i.e. isomer of Leucine)
  MOD_RES (10)..(10): Modified Cys
  See specification as filed for detailed description of substitutions and preferred embodiments
KKRPQRATLCVFAMF

SEQ ID NO: 3838 - protein, 15 aa, Artificial Sequence
  Description of Artificial Sequence: Synthetic peptide
  N-term H or Acetyl
  MOD_RES (8)..(8): Thr or Phospho-Thr
  MOD_RES (10)..(10): Modified Cys
  See specification as filed for detailed description of substitutions and preferred embodiments
KKRPQRATDCVFAMF

SEQ ID NO: 3839 - protein, 15 aa, Artificial Sequence
  Description of Artificial Sequence: Synthetic peptide
  N-term H or Acetyl
  MOD_RES (8)..(8): Thr or Phospho-Thr
  MOD_RES (10)..(10): Modified Cys
  See specification as filed for detailed description of substitutions and preferred embodiments
KKRPQRATECVFAMF

SEQ ID NO: 3840 - protein, 15 aa, Artificial Sequence
  Description of Artificial Sequence: Synthetic peptide
  N-term H or Acetyl
  MOD_RES (8)..(8): Thr or Phospho-Thr
  MOD_RES (10)..(10): Modified Cys
  See specification as filed for detailed description of substitutions and preferred embodiments
KKRPQRATFCVFAMF

SEQ ID NO: 3841 - protein, 15 aa, Artificial Sequence
  Description of Artificial Sequence: Synthetic peptide
  N-term H or Acetyl
  MOD_RES (8)..(8): Thr or Phospho-Thr
  MOD_RES (10)..(10): Modified Cys
  See specification as filed for detailed description of substitutions and preferred embodiments
KKRPQRATGCVFAMF

SEQ ID NO: 3842 - protein, 15 aa, Artificial Sequence
  Description of Artificial Sequence: Synthetic peptide
  N-term H or Acetyl
  MOD_RES (8)..(8): Thr or Phospho-Thr
  MOD_RES (10)..(10): Modified Cys
  See specification as filed for detailed description of substitutions and preferred embodiments
KKRPQRATHCVFAMF

SEQ ID NO: 3843 - protein, 15 aa, Artificial Sequence
  Description of Artificial Sequence: Synthetic peptide
  N-term H or Acetyl
  MOD_RES (8)..(8): Thr or Phospho-Thr
  MOD_RES (10)..(10): Modified Cys
  See specification as filed for detailed description of substitutions and preferred embodiments
KKRPQRATICVFAMF

SEQ ID NO: 3844 - protein, 15 aa, Artificial Sequence
  Description of Artificial Sequence: Synthetic peptide
  N-term H or Acetyl
  MOD_RES (8)..(8): Thr or Phospho-Thr
  MOD_RES (10)..(10): Modified Cys
  See specification as filed for detailed description of substitutions and preferred embodiments
KKRPQRATKCVFAMF

SEQ ID NO: 3845 - protein, 15 aa, Artificial Sequence
  Description of Artificial Sequence: Synthetic peptide
  N-term H or Acetyl
  MOD_RES (8)..(8): Thr or Phospho-Thr
  MOD_RES (10)..(10): Modified Cys
  See specification as filed for detailed description of substitutions and preferred embodiments
KKRPQRATLCVFAMF

SEQ ID NO: 3846 - protein, 15 aa, Artificial Sequence
  Description of Artificial Sequence: Synthetic peptide
  N-term H or Acetyl
  MOD_RES (8)..(8): Thr or Phospho-Thr
  MOD_RES (10)..(10): Modified Cys
  See specification as filed for detailed description of substitutions and preferred embodiments
KKRPQRATNCVFAMF

SEQ ID NO: 3847 - protein, 15 aa, Artificial Sequence
  Description of Artificial Sequence: Synthetic peptide
  N-term H or Acetyl
  MOD_RES (8)..(8): Thr or Phospho-Thr
  MOD_RES (10)..(10): Modified Cys
  See specification as filed for detailed description of substitutions and preferred embodiments
KKRPQRATPCVFAMF

SEQ ID NO: 3848 - protein, 15 aa, Artificial Sequence
  Description of Artificial Sequence: Synthetic peptide
  N-term H or Acetyl
  MOD_RES (8)..(8): Thr or Phospho-Thr
  MOD_RES (10)..(10): Modified Cys
  See specification as filed for detailed description of substitutions and preferred embodiments
KKRPQRATQCVFAMF

SEQ ID NO: 3849 - protein, 15 aa, Artificial Sequence
  Description of Artificial Sequence: Synthetic peptide
  N-term H or Acetyl
  MOD_RES (8)..(8): Thr or Phospho-Thr
  MOD_RES (10)..(10): Modified Cys
  See specification as filed for detailed description of substitutions and preferred embodiments
KKRPQRATRCVFAMF

SEQ ID NO: 3850 - protein, 15 aa, Artificial Sequence
  Description of Artificial Sequence: Synthetic peptide
  N-term H or Acetyl
  MOD_RES (8)..(8): Thr or Phospho-Thr
  MOD_RES (10)..(10): Modified Cys
  MOD_RES (11)..(11): Leu or Nle (i.e. isomer of Leucine)
  See specification as filed for detailed description of substitutions and preferred embodiments
KKRPQRATSCLFAMF

SEQ ID NO: 3851 - protein, 15 aa, Artificial Sequence
  Description of Artificial Sequence: Synthetic peptide
  N-term H or Acetyl
  MOD_RES (8)..(8): Thr or Phospho-Thr
  MOD_RES (10)..(10): Modified Cys
  See specification as filed for detailed description of substitutions and preferred embodiments
KKRPQRATSCDFAMF

SEQ ID NO: 3852 - protein, 15 aa, Artificial Sequence
  Description of Artificial Sequence: Synthetic peptide
  N-term H or Acetyl
  MOD_RES (8)..(8): Thr or Phospho-Thr
  MOD_RES (10)..(10): Modified Cys
  See specification as filed for detailed description of substitutions and preferred embodiments
KKRPQRATSCEFAMF

SEQ ID NO: 3853 - protein, 15 aa, Artificial Sequence
  Description of Artificial Sequence: Synthetic peptide
  N-term H or Acetyl
  MOD_RES (8)..(8): Thr or Phospho-Thr
  MOD_RES (10)..(10): Modified Cys
  See specification as filed for detailed description of substitutions and preferred embodiments
KKRPQRATSCFFAMF

SEQ ID NO: 3854 - protein, 15 aa, Artificial Sequence
  Description of Artificial Sequence: Synthetic peptide
  N-term H or Acetyl
  MOD_RES (8)..(8): Thr or Phospho-Thr
  MOD_RES (10)..(10): Modified Cys
  See specification as filed for detailed description of substitutions and preferred embodiments
KKRPQRATSCGFAMF

SEQ ID NO: 3855 - protein, 15 aa, Artificial Sequence
  Description of Artificial Sequence: Synthetic peptide
  N-term H or Acetyl
  MOD_RES (8)..(8): Thr or Phospho-Thr
  MOD_RES (10)..(10): Modified Cys
  See specification as filed for detailed description of substitutions and preferred embodiments
KKRPQRATSCHFAMF

SEQ ID NO: 3856 - protein, 15 aa, Artificial Sequence
  Description of Artificial Sequence: Synthetic peptide
  N-term H or Acetyl
  MOD_RES (8)..(8): Thr or Phospho-Thr
  MOD_RES (10)..(10): Modified Cys
  See specification as filed for detailed description of substitutions and preferred embodiments
KKRPQRATSCIFAMF

SEQ ID NO: 3857 - protein, 15 aa, Artificial Sequence
  Description of Artificial Sequence: Synthetic peptide
  N-term H or Acetyl
  MOD_RES (8)..(8): Thr or Phospho-Thr
  MOD_RES (10)..(10): Modified Cys
  See specification as filed for detailed description of substitutions and preferred embodiments
KKRPQRATSCKFAMF

SEQ ID NO: 3858 - protein, 15 aa, Artificial Sequence
  Description of Artificial Sequence: Synthetic peptide
  N-term H or Acetyl
  MOD_RES (8)..(8): Thr or Phospho-Thr
  MOD_RES (10)..(10): Modified Cys
  See specification as filed for detailed description of substitutions and preferred embodiments
KKRPQRATSCLFAMF

SEQ ID NO: 3859 - protein, 15 aa, Artificial Sequence
  Description of Artificial Sequence: Synthetic peptide
  N-term H or Acetyl
  MOD_RES (8)..(8): Thr or Phospho-Thr
  MOD_RES (10)..(10): Modified Cys
  See specification as filed for detailed description of substitutions and preferred embodiments
KKRPQRATSCNFAMF

SEQ ID NO: 3860 - protein, 15 aa, Artificial Sequence
  Description of Artificial Sequence: Synthetic peptide
  N-term H or Acetyl
  MOD_RES (8)..(8): Thr or Phospho-Thr
  MOD_RES (10)..(10): Modified Cys
  See specification as filed for detailed description of substitutions and preferred embodiments
KKRPQRATSCPFAMF

SEQ ID NO: 3861 - protein, 15 aa, Artificial Sequence
  Description of Artificial Sequence: Synthetic peptide
  N-term H or Acetyl
  MOD_RES (8)..(8): Thr or Phospho-Thr
  MOD_RES (10)..(10): Modified Cys
  See specification as filed for detailed description of substitutions and preferred embodiments
KKRPQRATSCQFAMF

SEQ ID NO: 3862 - protein, 15 aa, Artificial Sequence
  Description of Artificial Sequence: Synthetic peptide
  N-term H or Acetyl
  MOD_RES (8)..(8): Thr or Phospho-Thr
  MOD_RES (10)..(10): Modified Cys
  See specification as filed for detailed description of substitutions and preferred embodiments
KKRPQRATSCRFAMF

SEQ ID NO: 3863 - protein, 15 aa, Artificial Sequence
  Description of Artificial Sequence: Synthetic peptide
  N-term H or Acetyl
  MOD_RES (8)..(8): Thr or Phospho-Thr
  MOD_RES (10)..(10): Modified Cys
  MOD_RES (12)..(12): Leu or Nle (i.e. isomer of Leucine)
  See specification as filed for detailed description of substitutions and preferred embodiments
KKRPQRATSCVLAMF

SEQ ID NO: 3864 - protein, 15 aa, Artificial Sequence
  Description of Artificial Sequence: Synthetic peptide
  N-term H or Acetyl
  MOD_RES (8)..(8): Thr or Phospho-Thr
  MOD_RES (10)..(10): Modified Cys
  See specification as filed for detailed description of substitutions and preferred embodiments
KKRPQRATSCVDAMF

SEQ ID NO: 3865 - protein, 15 aa, Artificial Sequence
  Description of Artificial Sequence: Synthetic peptide
  N-term H or Acetyl
  MOD_RES (8)..(8): Thr or Phospho-Thr
  MOD_RES (10)..(10): Modified Cys
  See specification as filed for detailed description of substitutions and preferred embodiments
KKRPQRATSCVEAMF

SEQ ID NO: 3866 - protein, 15 aa, Artificial Sequence
  Description of Artificial Sequence: Synthetic peptide
  N-term H or Acetyl
  MOD_RES (8)..(8): Thr or Phospho-Thr
  MOD_RES (10)..(10): Modified Cys
  MOD_RES (13)..(13): Leu or Nle (i.e. isomer of Leucine)
  See specification as filed for detailed description of substitutions and preferred embodiments
KKRPQRATSCVFLMF

SEQ ID NO: 3867 - protein, 15 aa, Artificial Sequence
  Description of Artificial Sequence: Synthetic peptide
  N-term H or Acetyl
  MOD_RES (8)..(8): Thr or Phospho-Thr
  MOD_RES (10)..(10): Modified Cys
  See specification as filed for detailed description of substitutions and preferred embodiments
KKRPQRATSCVFADF

SEQ ID NO: 3868 - protein, 15 aa, Artificial Sequence
  Description of Artificial Sequence: Synthetic peptide
  N-term H or Acetyl
  MOD_RES (8)..(8): Thr or Phospho-Thr
  MOD_RES (10)..(10): Modified Cys
  See specification as filed for detailed description of substitutions and preferred embodiments
KKRPQRATSCVFAEF

SEQ ID NO: 3869 - protein, 15 aa, Artificial Sequence
  Description of Artificial Sequence: Synthetic peptide
  N-term H or Acetyl
  MOD_RES (8)..(8): Thr or Phospho-Thr
  MOD_RES (10)..(10): Modified Cys
  See specification as filed for detailed description of substitutions and preferred embodiments
KKRPQRATSCVFAFF

SEQ ID NO: 3870 - protein, 15 aa, Artificial Sequence
  Description of Artificial Sequence: Synthetic peptide
  N-term H or Acetyl
  MOD_RES (8)..(8): Thr or Phospho-Thr
  MOD_RES (10)..(10): Modified Cys
  See specification as filed for detailed description of substitutions and preferred embodiments
KKRPQRATSCVFAGF

SEQ ID NO: 3871 - protein, 15 aa, Artificial Sequence
  Description of Artificial Sequence: Synthetic peptide
  N-term H or Acetyl
  MOD_RES (8)..(8): Thr or Phospho-Thr
  MOD_RES (10)..(10): Modified Cys
  See specification as filed for detailed description of substitutions and preferred embodiments
KKRPQRATSCVFAHF

SEQ ID NO: 3872 - protein, 15 aa, Artificial Sequence
  Description of Artificial Sequence: Synthetic peptide
  N-term H or Acetyl
  MOD_RES (8)..(8): Thr or Phospho-Thr
  MOD_RES (10)..(10): Modified Cys
  See specification as filed for detailed description of substitutions and preferred embodiments
KKRPQRATSCVFAIF

SEQ ID NO: 3873 - protein, 15 aa, Artificial Sequence
  Description of Artificial Sequence: Synthetic peptide
  N-term H or Acetyl
  MOD_RES (8)..(8): Thr or Phospho-Thr
  MOD_RES (10)..(10): Modified Cys
  See specification as filed for detailed description of substitutions and preferred embodiments
KKRPQRATSCVFAKF

SEQ ID NO: 3874 - protein, 15 aa, Artificial Sequence
  Description of Artificial Sequence: Synthetic peptide
  N-term H or Acetyl
  MOD_RES (8)..(8): Thr or Phospho-Thr
  MOD_RES (10)..(10): Modified Cys
  See specification as filed for detailed description of substitutions and preferred embodiments
KKRPQRATSCVFALF

SEQ ID NO: 3875 - protein, 15 aa, Artificial Sequence
  Description of Artificial Sequence: Synthetic peptide
  N-term H or Acetyl
  MOD_RES (8)..(8): Thr or Phospho-Thr
  MOD_RES (10)..(10): Modified Cys
  MOD_RES (15)..(15): Leu or Nle (i.e. isomer of Leucine)
  See specification as filed for detailed description of substitutions and preferred embodiments
KKRPQRATSCVFAML

SEQ ID NO: 3876 - protein, 15 aa, Artificial Sequence
  Description of Artificial Sequence: Synthetic peptide
  N-term H or Acetyl
  MOD_RES (8)..(8): Thr or Phospho-Thr
  MOD_RES (10)..(10): Modified Cys
  See specification as filed for detailed description of substitutions and preferred embodiments
KKRPQRATSCVFAMD

SEQ ID NO: 3877 - protein, 15 aa, Artificial Sequence
  Description of Artificial Sequence: Synthetic peptide
  N-term H or Acetyl
  MOD_RES (8)..(8): Thr or Phospho-Thr
  MOD_RES (10)..(10): Modified Cys
  See specification as filed for detailed description of substitutions and preferred embodiments
KKRPQRATSCVFAME

SEQ ID NO: 3878 - protein, 15 aa, Artificial Sequence
  Description of Artificial Sequence: Synthetic peptide
  N-term H or Acetyl
  MOD_RES (8)..(8): Thr or Phospho-Thr
  MOD_RES (10)..(10): Modified Cys
  See specification as filed for detailed description of substitutions and preferred embodiments
KKRPQRATSCVFAMG

SEQ ID NO: 3879 - protein, 15 aa, Artificial Sequence
  Description of Artificial Sequence: Synthetic peptide
  N-term H or Acetyl
  MOD_RES (8)..(8): Thr or Phospho-Thr
  MOD_RES (10)..(10): Modified Cys
  See specification as filed for detailed description of substitutions and preferred embodiments
KKRPQRATSCVFAMH

SEQ ID NO: 3880 - protein, 15 aa, Artificial Sequence
  Description of Artificial Sequence: Synthetic peptide
  N-term H or Acetyl
  MOD_RES (8)..(8): Thr or Phospho-Thr
  MOD_RES (10)..(10): Modified Cys
  See specification as filed for detailed description of substitutions and preferred embodiments
KKRPQRATSCVFAMI

SEQ ID NO: 3881 - protein, 15 aa, Artificial Sequence
  Description of Artificial Sequence: Synthetic peptide
  N-term H or Acetyl
  MOD_RES (8)..(8): Thr or Phospho-Thr
  MOD_RES (10)..(10): Modified Cys
  See specification as filed for detailed description of substitutions and preferred embodiments
KKRPQRATSCVFAMK

SEQ ID NO: 3882 - protein, 15 aa, Artificial Sequence
  Description of Artificial Sequence: Synthetic peptide
  N-term H or Acetyl
  MOD_RES (8)..(8): Thr or Phospho-Thr
  MOD_RES (10)..(10): Modified Cys
  See specification as filed for detailed description of substitutions and preferred embodiments
KKRPQRATSCVFAML

SEQ ID NO: 3883 - protein, 15 aa, Artificial Sequence
  Description of Artificial Sequence: Synthetic peptide
  N-term H or Acetyl
  MOD_RES (8)..(8): Thr or Phospho-Thr
  MOD_RES (10)..(10): Modified Cys
  See specification as filed for detailed description of substitutions and preferred embodiments
KKRPQRATSCVFAMN

SEQ ID NO: 3884 - protein, 15 aa, Artificial Sequence
  Description of Artificial Sequence: Synthetic peptide
  N-term H or Acetyl
  MOD_RES (8)..(8): Thr or Phospho-Thr
  MOD_RES (10)..(10): Modified Cys
  See specification as filed for detailed description of substitutions and preferred embodiments
KKRPQRATSCVFAMP

SEQ ID NO: 3885 - protein, 15 aa, Artificial Sequence
  Description of Artificial Sequence: Synthetic peptide
  N-term H or Acetyl
  MOD_RES (8)..(8): Thr or Phospho-Thr
  MOD_RES (10)..(10): Modified Cys
  See specification as filed for detailed description of substitutions and preferred embodiments
KKRPQRATSCVFAMQ

SEQ ID NO: 3886 - protein, 15 aa, Artificial Sequence
  Description of Artificial Sequence: Synthetic peptide
  N-term H or Acetyl
  MOD_RES (8)..(8): Thr or Phospho-Thr
  MOD_RES (10)..(10): Modified Cys
  See specification as filed for detailed description of substitutions and preferred embodiments
KKRPQRATSCVFAMR

SEQ ID NO: 3887 - protein, 15 aa, Artificial Sequence
  Description of Artificial Sequence: Synthetic peptide
  N-term H or Acetyl
  MOD_RES (8)..(8): Thr or Phospho-Thr
  MOD_RES (10)..(10): Modified Cys
  See specification as filed for detailed description of substitutions and preferred embodiments
KKRPQRATSCVFAMV

SEQ ID NO: 3888 - protein, 15 aa, Artificial Sequence
  Description of Artificial Sequence: Synthetic peptide
  N-term H or Acetyl
  MOD_RES (8)..(8): Thr or Phospho-Thr
  MOD_RES (10)..(10): Modified Cys
  See specification as filed for detailed description of substitutions and preferred embodiments
KKRPQRATSCVFAMW

SEQ ID NO: 3889 - protein, 15 aa, Artificial Sequence
  Description of Artificial Sequence: Synthetic peptide
  N-term H or Acetyl
  MOD_RES (8)..(8): Thr or Phospho-Thr
  MOD_RES (10)..(10): Modified Cys
  See specification as filed for detailed description of substitutions and preferred embodiments
KKRPQRATSCVFANF

SEQ ID NO: 3890 - protein, 15 aa, Artificial Sequence
  Description of Artificial Sequence: Synthetic peptide
  N-term H or Acetyl
  MOD_RES (8)..(8): Thr or Phospho-Thr
  MOD_RES (10)..(10): Modified Cys
  See specification as filed for detailed description of substitutions and preferred embodiments
KKRPQRATSCVFAPF

SEQ ID NO: 3891 - protein, 15 aa, Artificial Sequence
  Description of Artificial Sequence: Synthetic peptide
  N-term H or Acetyl
  MOD_RES (8)..(8): Thr or Phospho-Thr
  MOD_RES (10)..(10): Modified Cys
  See specification as filed for detailed description of substitutions and preferred embodiments
KKRPQRATSCVFAQF

SEQ ID NO: 3892 - protein, 15 aa, Artificial Sequence
  Description of Artificial Sequence: Synthetic peptide
  N-term H or Acetyl
  MOD_RES (8)..(8): Thr or Phospho-Thr
  MOD_RES (10)..(10): Modified Cys
  See specification as filed for detailed description of substitutions and preferred embodiments
KKRPQRATSCVFARF

SEQ ID NO: 3893 - protein, 15 aa, Artificial Sequence
  Description of Artificial Sequence: Synthetic peptide
  N-term H or Acetyl
  MOD_RES (8)..(8): Thr or Phospho-Thr
  MOD_RES (10)..(10): Modified Cys
  See specification as filed for detailed description of substitutions and preferred embodiments
KKRPQRATSCVFAVF

SEQ ID NO: 3894 - protein, 15 aa, Artificial Sequence
  Description of Artificial Sequence: Synthetic peptide
  N-term H or Acetyl
  MOD_RES (8)..(8): Thr or Phospho-Thr
  MOD_RES (10)..(10): Modified Cys
  See specification as filed for detailed description of substitutions and preferred embodiments
KKRPQRATSCVFAWF

SEQ ID NO: 3895 - protein, 15 aa, Artificial Sequence
  Description of Artificial Sequence: Synthetic peptide
  N-term H or Acetyl
  MOD_RES (8)..(8): Thr or Phospho-Thr
  MOD_RES (10)..(10): Modified Cys
  See specification as filed for detailed description of substitutions and preferred embodiments
KKRPQRATSCVFDMF

SEQ ID NO: 3896 - protein, 15 aa, Artificial Sequence
  Description of Artificial Sequence: Synthetic peptide
  N-term H or Acetyl
  MOD_RES (8)..(8): Thr or Phospho-Thr
  MOD_RES (10)..(10): Modified Cys
  See specification as filed for detailed description of substitutions and preferred embodiments
KKRPQRATSCVFEMF

SEQ ID NO: 3897 - protein, 15 aa, Artificial Sequence
  Description of Artificial Sequence: Synthetic peptide
  N-term H or Acetyl
  MOD_RES (8)..(8): Thr or Phospho-Thr
  MOD_RES (10)..(10): Modified Cys
  See specification as filed for detailed description of substitutions and preferred embodiments
KKRPQRATSCVFFMF

SEQ ID NO: 3898 - protein, 15 aa, Artificial Sequence
  Description of Artificial Sequence: Synthetic peptide
  N-term H or Acetyl
  MOD_RES (8)..(8): Thr or Phospho-Thr
  MOD_RES (10)..(10): Modified Cys
  See specification as filed for detailed description of substitutions and preferred embodiments
KKRPQRATSCVFGMF

SEQ ID NO: 3899 - protein, 15 aa, Artificial Sequence
  Description of Artificial Sequence: Synthetic peptide
  N-term H or Acetyl
  MOD_RES (8)..(8): Thr or Phospho-Thr
  MOD_RES (10)..(10): Modified Cys
  See specification as filed for detailed description of substitutions and preferred embodiments
KKRPQRATSCVFHMF

SEQ ID NO: 3900 - protein, 15 aa, Artificial Sequence
  Description of Artificial Sequence: Synthetic peptide
  N-term H or Acetyl
  MOD_RES (8)..(8): Thr or Phospho-Thr
  MOD_RES (10)..(10): Modified Cys
  See specification as filed for detailed description of substitutions and preferred embodiments
KKRPQRATSCVFIMF

SEQ ID NO: 3901 - protein, 15 aa, Artificial Sequence
  Description of Artificial Sequence: Synthetic peptide
  N-term H or Acetyl
  MOD_RES (8)..(8): Thr or Phospho-Thr
  MOD_RES (10)..(10): Modified Cys
  See specification as filed for detailed description of substitutions and preferred embodiments
KKRPQRATSCVFKMF

SEQ ID NO: 3902 - protein, 15 aa, Artificial Sequence
  Description of Artificial Sequence: Synthetic peptide
  N-term H or Acetyl
  MOD_RES (8)..(8): Thr or Phospho-Thr
  MOD_RES (10)..(10): Modified Cys
  See specification as filed for detailed description of substitutions and preferred embodiments
KKRPQRATSCVFLMF

SEQ ID NO: 3903 - protein, 15 aa, Artificial Sequence
  Description of Artificial Sequence: Synthetic peptide
  N-term H or Acetyl
  MOD_RES (8)..(8): Thr or Phospho-Thr
  MOD_RES (10)..(10): Modified Cys
  See specification as filed for detailed description of substitutions and preferred embodiments
KKRPQRATSCVFNMF

SEQ ID NO: 3904 - protein, 15 aa, Artificial Sequence
  Description of Artificial Sequence: Synthetic peptide
  N-term H or Acetyl
  MOD_RES (8)..(8): Thr or Phospho-Thr
  MOD_RES (10)..(10): Modified Cys
  See specification as filed for detailed description of substitutions and preferred embodiments
KKRPQRATSCVFPMF

SEQ ID NO: 3905 - protein, 15 aa, Artificial Sequence
  Description of Artificial Sequence: Synthetic peptide
  N-term H or Acetyl
  MOD_RES (8)..(8): Thr or Phospho-Thr
  MOD_RES (10)..(10): Modified Cys
  See specification as filed for detailed description of substitutions and preferred embodiments
KKRPQRATSCVFQMF

SEQ ID NO: 3906 - protein, 15 aa, Artificial Sequence
  Description of Artificial Sequence: Synthetic peptide
  N-term H or Acetyl
  MOD_RES (8)..(8): Thr or Phospho-Thr
  MOD_RES (10)..(10): Modified Cys
  See specification as filed for detailed description of substitutions and preferred embodiments
KKRPQRATSCVFRMF

SEQ ID NO: 3907 - protein, 15 aa, Artificial Sequence
  Description of Artificial Sequence: Synthetic peptide
  N-term H or Acetyl
  MOD_RES (8)..(8): Thr or Phospho-Thr
  MOD_RES (10)..(10): Modified Cys
  See specification as filed for detailed description of substitutions and preferred embodiments
KKRPQRATSCVFVMF

SEQ ID NO: 3908 - protein, 15 aa, Artificial Sequence
  Description of Artificial Sequence: Synthetic peptide
  N-term H or Acetyl
  MOD_RES (8)..(8): Thr or Phospho-Thr
  MOD_RES (10)..(10): Modified Cys
  See specification as filed for detailed description of substitutions and preferred embodiments
KKRPQRATSCVFWMF

SEQ ID NO: 3909 - protein, 15 aa, Artificial Sequence
  Description of Artificial Sequence: Synthetic peptide
  N-term H or Acetyl
  MOD_RES (8)..(8): Thr or Phospho-Thr
  MOD_RES (10)..(10): Modified Cys
  See specification as filed for detailed description of substitutions and preferred embodiments
KKRPQRATSCVGAMF

SEQ ID NO: 3910 - protein, 15 aa, Artificial Sequence
  Description of Artificial Sequence: Synthetic peptide
  N-term H or Acetyl
  MOD_RES (8)..(8): Thr or Phospho-Thr
  MOD_RES (10)..(10): Modified Cys
  See specification as filed for detailed description of substitutions and preferred embodiments
KKRPQRATSCVHAMF

SEQ ID NO: 3911 - protein, 15 aa, Artificial Sequence
  Description of Artificial Sequence: Synthetic peptide
  N-term H or Acetyl
  MOD_RES (8)..(8): Thr or Phospho-Thr
  MOD_RES (10)..(10): Modified Cys
  See specification as filed for detailed description of substitutions and preferred embodiments
KKRPQRATSCVIAMF

SEQ ID NO: 3912 - protein, 15 aa, Artificial Sequence
  Description of Artificial Sequence: Synthetic peptide
  N-term H or Acetyl
  MOD_RES (8)..(8): Thr or Phospho-Thr
  MOD_RES (10)..(10): Modified Cys
  See specification as filed for detailed description of substitutions and preferred embodiments
KKRPQRATSCVKAMF

SEQ ID NO: 3913 - protein, 15 aa, Artificial Sequence
  Description of Artificial Sequence: Synthetic peptide
  N-term H or Acetyl
  MOD_RES (8)..(8): Thr or Phospho-Thr
  MOD_RES (10)..(10): Modified Cys
  See specification as filed for detailed description of substitutions and preferred embodiments
KKRPQRATSCVLAMF

SEQ ID NO: 3914 - protein, 15 aa, Artificial Sequence
  Description of Artificial Sequence: Synthetic peptide
  N-term H or Acetyl
  MOD_RES (8)..(8): Thr or Phospho-Thr
  MOD_RES (10)..(10): Modified Cys
  See specification as filed for detailed description of substitutions and preferred embodiments
KKRPQRATSCVNAMF

SEQ ID NO: 3915 - protein, 15 aa, Artificial Sequence
  Description of Artificial Sequence: Synthetic peptide
  N-term H or Acetyl
  MOD_RES (8)..(8): Thr or Phospho-Thr
  MOD_RES (10)..(10): Modified Cys
  See specification as filed for detailed description of substitutions and preferred embodiments
KKRPQRATSCVPAMF

SEQ ID NO: 3916 - protein, 15 aa, Artificial Sequence
  Description of Artificial Sequence: Synthetic peptide
  N-term H or Acetyl
  MOD_RES (8)..(8): Thr or Phospho-Thr
  MOD_RES (10)..(10): Modified Cys
  See specification as filed for detailed description of substitutions and preferred embodiments
KKRPQRATSCVQAMF

SEQ ID NO: 3917 - protein, 15 aa, Artificial Sequence
  Description of Artificial Sequence: Synthetic peptide
  N-term H or Acetyl
  MOD_RES (8)..(8): Thr or Phospho-Thr
  MOD_RES (10)..(10): Modified Cys
  See specification as filed for detailed description of substitutions and preferred embodiments
KKRPQRATSCVRAMF

SEQ ID NO: 3918 - protein, 15 aa, Artificial Sequence
  Description of Artificial Sequence: Synthetic peptide
  N-term H or Acetyl
  MOD_RES (8)..(8): Thr or Phospho-Thr
  MOD_RES (10)..(10): Modified Cys
  See specification as filed for detailed description of substitutions and preferred embodiments
KKRPQRATSCVVAMF

SEQ ID NO: 3919 - protein, 15 aa, Artificial Sequence
  Description of Artificial Sequence: Synthetic peptide
  N-term H or Acetyl
  MOD_RES (8)..(8): Thr or Phospho-Thr
  MOD_RES (10)..(10): Modified Cys
  See specification as filed for detailed description of substitutions and preferred embodiments
KKRPQRATSCVWAMF

SEQ ID NO: 3920 - protein, 15 aa, Artificial Sequence
  Description of Artificial Sequence: Synthetic peptide
  N-term H or Acetyl
  MOD_RES (8)..(8): Thr or Phospho-Thr
  MOD_RES (10)..(10): Modified Cys
  See specification as filed for detailed description of substitutions and preferred embodiments
KKRPQRATSCWFAMF

SEQ ID NO: 3921 - protein, 15 aa, Artificial Sequence
  Description of Artificial Sequence: Synthetic peptide
  N-term H or Acetyl
  MOD_RES (8)..(8): Thr or Phospho-Thr
  MOD_RES (10)..(10): Modified Cys
  See specification as filed for detailed description of substitutions and preferred embodiments
KKRPQRATVCVFAMF

SEQ ID NO: 3922 - protein, 15 aa, Artificial Sequence
  Description of Artificial Sequence: Synthetic peptide
  N-term H or Acetyl
  MOD_RES (8)..(8): Thr or Phospho-Thr
  MOD_RES (10)..(10): Modified Cys
  See specification as filed for detailed description of substitutions and preferred embodiments
KKRPQRATWCVFAMF

SEQ ID NO: 3923 - protein, 12 aa, Artificial Sequence
  Description of Artificial Sequence: Synthetic peptide
  N-term H or Acetyl
  MOD_RES (7)..(7): Modified Cys
  MOD_RES (9)..(9): Ser or Phospho-Ser
  See specification as filed for detailed description of substitutions and preferred embodiments
KKRPQRCYSNVF

SEQ ID NO: 3924 - protein, 15 aa, Artificial Sequence
  Description of Artificial Sequence: Synthetic peptide
  N-term H or Acetyl
  MOD_RES (8)..(8): Thr or Phospho-Thr
  MOD_RES (10)..(10): Modified Cys
  See specification as filed for detailed description of substitutions and preferred embodiments
KKRPQRDTSCVFAMF

SEQ ID NO: 3925 - protein, 15 aa, Artificial Sequence
  Description of Artificial Sequence: Synthetic peptide
  N-term H or Acetyl
  MOD_RES (8)..(8): Thr or Phospho-Thr
  MOD_RES (10)..(10): Modified Cys
  See specification as filed for detailed description of substitutions and preferred embodiments
KKRPQRETSCVFAMF

SEQ ID NO: 3926 - protein, 15 aa, Artificial Sequence
  Description of Artificial Sequence: Synthetic peptide
  N-term H or Acetyl
  MOD_RES (8)..(8): Thr or Phospho-Thr
  MOD_RES (10)..(10): Modified Cys
  See specification as filed for detailed description of substitutions and preferred embodiments
KKRPQRFTSCVFAMF

SEQ ID NO: 3927 - protein, 15 aa, Artificial Sequence
  Description of Artificial Sequence: Synthetic peptide
  N-term H or Acetyl
  MOD_RES (8)..(8): Thr or Phospho-Thr
  MOD_RES (10)..(10): Modified Cys
  See specification as filed for detailed description of substitutions and preferred embodiments
KKRPQRGTSCVFAMF

SEQ ID NO: 3928 - protein, 15 aa, Artificial Sequence
  Description of Artificial Sequence: Synthetic peptide
  N-term H or Acetyl
  MOD_RES (8)..(8): Thr or Phospho-Thr
  MOD_RES (10)..(10): Modified Cys
  See specification as filed for detailed description of substitutions and preferred embodiments
KKRPQRHTSCVFAMF

SEQ ID NO: 3929 - protein, 15 aa, Artificial Sequence
  Description of Artificial Sequence: Synthetic peptide
  N-term H or Acetyl
  MOD_RES (8)..(8): Thr or Phospho-Thr
  MOD_RES (10)..(10): Modified Cys
  See specification as filed for detailed description of substitutions and preferred embodiments
KKRPQRITSCVFAMF

SEQ ID NO: 3930 - protein, 15 aa, Artificial Sequence
  Description of Artificial Sequence: Synthetic peptide
  N-term H or Acetyl
  MOD_RES (8)..(8): Thr or Phospho-Thr
  MOD_RES (10)..(10): Modified Cys
  See specification as filed for detailed description of substitutions and preferred embodiments
KKRPQRKTSCVFAMF

SEQ ID NO: 3931 - protein, 15 aa, Artificial Sequence
  Description of Artificial Sequence: Synthetic peptide
  N-term H or Acetyl
  MOD_RES (8)..(8): Thr or Phospho-Thr
  MOD_RES (10)..(10): Modified Cys
  See specification as filed for detailed description of substitutions and preferred embodiments
KKRPQRLTSCVFAMF

SEQ ID NO: 3932 - protein, 15 aa, Artificial Sequence
  Description of Artificial Sequence: Synthetic peptide
  N-term H or Acetyl
  MOD_RES (8)..(8): Thr or Phospho-Thr
  MOD_RES (10)..(10): Modified Cys
  See specification as filed for detailed description of substitutions and preferred embodiments
KKRPQRNTSCVFAMF

SEQ ID NO: 3933 - protein, 15 aa, Artificial Sequence
  Description of Artificial Sequence: Synthetic peptide
  N-term H or Acetyl
  MOD_RES (8)..(8): Thr or Phospho-Thr
  MOD_RES (10)..(10): Modified Cys
  See specification as filed for detailed description of substitutions and preferred embodiments
KKRPQRPTSCVFAMF

SEQ ID NO: 3934 - protein, 15 aa, Artificial Sequence
  Description of Artificial Sequence: Synthetic peptide
  N-term H or Acetyl
  MOD_RES (8)..(8): Thr or Phospho-Thr
  MOD_RES (10)..(10): Modified Cys
  See specification as filed for detailed description of substitutions and preferred embodiments
KKRPQRQTSCVFAMF

SEQ ID NO: 3935 - protein, 15 aa, Artificial Sequence
  Description of Artificial Sequence: Synthetic peptide
  N-term H or Acetyl
  MOD_RES (8)..(8): Thr or Phospho-Thr
  MOD_RES (10)..(10): Modified Cys
  See specification as filed for detailed description of substitutions and preferred embodiments
KKRPQRRTSCVFAMF

SEQ ID NO: 3936 - protein, 12 aa, Artificial Sequence
  Description of Artificial Sequence: Synthetic peptide
  N-term H or Acetyl
  MOD_RES (9)..(9): Ser or Phospho-Ser
  MOD_RES (11)..(11): Modified Cys
  See specification as filed for detailed description of substitutions and preferred embodiments
KKRPQRRYSNCF

SEQ ID NO: 3937 - protein, 15 aa, Artificial Sequence
  Description of Artificial Sequence: Synthetic peptide
  N-term H or Acetyl
  MOD_RES (8)..(8): Thr or Phospho-Thr
  MOD_RES (10)..(10): Modified Cys
  See specification as filed for detailed description of substitutions and preferred embodiments
KKRPQRVTSCVFAMF

SEQ ID NO: 3938 - protein, 15 aa, Artificial Sequence
  Description of Artificial Sequence: Synthetic peptide
  N-term H or Acetyl
  MOD_RES (8)..(8): Thr or Phospho-Thr
  MOD_RES (10)..(10): Modified Cys
  See specification as filed for detailed description of substitutions and preferred embodiments
KKRPQRWTSCVFAMF

SEQ ID NO: 3939 - protein, 15 aa, Artificial Sequence
  Description of Artificial Sequence: Synthetic peptide
  N-term H or Acetyl
  MOD_RES (8)..(8): Thr or Phospho-Thr
  MOD_RES (10)..(10): Modified Cys
  See specification as filed for detailed description of substitutions and preferred embodiments
KKRPQVATSCVFAMF

SEQ ID NO: 3940 - protein, 15 aa, Artificial Sequence
  Description of Artificial Sequence: Synthetic peptide
  N-term H or Acetyl
  MOD_RES (8)..(8): Thr or Phospho-Thr
  MOD_RES (10)..(10): Modified Cys
  See specification as filed for detailed description of substitutions and preferred embodiments
KKRPQWATSCVFAMF

SEQ ID NO: 3941 - protein, 15 aa, Artificial Sequence
  Description of Artificial Sequence: Synthetic peptide
  N-term H or Acetyl
  MOD_RES (8)..(8): Thr or Phospho-Thr
  MOD_RES (10)..(10): Modified Cys
  See specification as filed for detailed description of substitutions and preferred embodiments
KKRPRRATSCVFAMF

SEQ ID NO: 3942 - protein, 15 aa, Artificial Sequence
  Description of Artificial Sequence: Synthetic peptide
  N-term H or Acetyl
  MOD_RES (8)..(8): Thr or Phospho-Thr
  MOD_RES (10)..(10): Modified Cys
  See specification as filed for detailed description of substitutions and preferred embodiments
KKRPVRATSCVFAMF

SEQ ID NO: 3943 - protein, 15 aa, Artificial Sequence
  Description of Artificial Sequence: Synthetic peptide
  N-term H or Acetyl
  MOD_RES (8)..(8): Thr or Phospho-Thr
  MOD_RES (10)..(10): Modified Cys
  See specification as filed for detailed description of substitutions and preferred embodiments
KKRPWRATSCVFAMF

SEQ ID NO: 3944 - protein, 15 aa, Artificial Sequence
  Description of Artificial Sequence: Synthetic peptide
  N-term H or Acetyl
  MOD_RES (8)..(8): Thr or Phospho-Thr
  MOD_RES (10)..(10): Modified Cys
  See specification as filed for detailed description of substitutions and preferred embodiments
KKRQQRATSCVFAMF

SEQ ID NO: 3945 - protein, 15 aa, Artificial Sequence
  Description of Artificial Sequence: Synthetic peptide
  N-term H or Acetyl
  MOD_RES (8)..(8): Thr or Phospho-Thr
  MOD_RES (10)..(10): Modified Cys
  See specification as filed for detailed description of substitutions and preferred embodiments
KKRRQRATSCVFAMF

SEQ ID NO: 3946 - protein, 15 aa, Artificial Sequence
  Description of Artificial Sequence: Synthetic peptide
  N-term H or Acetyl
  MOD_RES (8)..(8): Thr or Phospho-Thr
  MOD_RES (10)..(10): Modified Cys
  See specification as filed for detailed description of substitutions and preferred embodiments
KKRVQRATSCVFAMF

SEQ ID NO: 3947 - protein, 15 aa, Artificial Sequence
  Description of Artificial Sequence: Synthetic peptide
  N-term H or Acetyl
  MOD_RES (8)..(8): Thr or Phospho-Thr
  MOD_RES (10)..(10): Modified Cys
  See specification as filed for detailed description of substitutions and preferred embodiments
KKRWQRATSCVFAMF

SEQ ID NO: 3948 - protein, 13 aa, Artificial Sequence
  Description of Artificial Sequence: Synthetic peptide
  N-term H or Acetyl
  MOD_RES (3)..(3): Ser or Phospho-Ser
  MOD_RES (5)..(5): Modified Cys
  MOD_RES (8)..(8): Leu or Nle (i.e. isomer of Leucine)
  MOD_RES (10)..(10): Leu or Nle (i.e. isomer of Leucine)
  See specification as filed for detailed description of substitutions and preferred embodiments
KKSRCDYLTLQIG

SEQ ID NO: 3949 - protein, 15 aa, Artificial Sequence
  Description of Artificial Sequence: Synthetic peptide
  N-term H or Acetyl
  MOD_RES (8)..(8): Thr or Phospho-Thr
  MOD_RES (10)..(10): Modified Cys
  See specification as filed for detailed description of substitutions and preferred embodiments
KKVPQRATSCVFAMF

SEQ ID NO: 3950 - protein, 21 aa, Artificial Sequence
  Description of Artificial Sequence: Synthetic peptide
  N-term H or Acetyl
  MOD_RES (13)..(13): Ser or Phospho-Ser
  MOD_RES (14)..(14): Leu or Nle (i.e. isomer of Leucine)
  MOD_RES (15)..(15): Modified Cys
  See specification as filed for detailed description of substitutions and preferred embodiments
KKVSRSGLYRSPSLCENLNRP

SEQ ID NO: 3951 - protein, 20 aa, Artificial Sequence
  Description of Artificial Sequence: Synthetic peptide
  N-term H or Acetyl
  MOD_RES (13)..(13): Ser or Phospho-Ser
  MOD_RES (14)..(14): Leu or Nle (i.e. isomer of Leucine)
  MOD_RES (15)..(15): Modified Cys
  See specification as filed for detailed description of substitutions and preferred embodiments
KKVSRSGLYRSPSLCENLNR

SEQ ID NO: 3952 - protein, 22 aa, Artificial Sequence
  Description of Artificial Sequence: Synthetic peptide
  N-term H or Acetyl
  MOD_RES (13)..(13): Ser or Phospho-Ser
  MOD_RES (15)..(15): Modified Cys
  See specification as filed for detailed description of substitutions and preferred embodiments
KKVSRSGLYRSPSMCENLNRPR

SEQ ID NO: 3953 - protein, 21 aa, Artificial Sequence
  Description of Artificial Sequence: Synthetic peptide
  N-term H or Acetyl
  MOD_RES (13)..(13): Ser or Phospho-Ser
  MOD_RES (15)..(15): Modified Cys
  See specification as filed for detailed description of substitutions and preferred embodiments
KKVSRSGLYRSPSMCENLNRP

SEQ ID NO: 3954 - protein, 20 aa, Artificial Sequence
  Description of Artificial Sequence: Synthetic peptide
  N-term H or Acetyl
  MOD_RES (13)..(13): Ser or Phospho-Ser
  MOD_RES (15)..(15): Modified Cys
  See specification as filed for detailed description of substitutions and preferred embodiments
KKVSRSGLYRSPSMCENLNR

SEQ ID NO: 3955 - protein, 15 aa, Artificial Sequence
  Description of Artificial Sequence: Synthetic peptide
  N-term H or Acetyl
  MOD_RES (8)..(8): Thr or Phospho-Thr
  MOD_RES (10)..(10): Modified Cys
  See specification as filed for detailed description of substitutions and preferred embodiments
KKWPQRATSCVFAMF

SEQ ID NO: 3956 - protein, 18 aa, Artificial Sequence
  Description of Artificial Sequence: Synthetic peptide
  N-term H or Acetyl
  MOD_RES (14)..(14): Ser or Phospho-Ser
  MOD_RES (16)..(16): Modified Cys
  See specification as filed for detailed description of substitutions and preferred embodiments
KLKTTKKRPQRATSNCFS

SEQ ID NO: 3957 - protein, 18 aa, Artificial Sequence
  Description of Artificial Sequence: Synthetic peptide
  N-term H or Acetyl
  MOD_RES (16)..(16): Modified Cys
  MOD_RES (18)..(18): Ser or Phospho-Ser
  See specification as filed for detailed description of substitutions and preferred embodiments
KLKTTKKRPQRATSNCFS

SEQ ID NO: 3958 - protein, 12 aa, Artificial Sequence
  Description of Artificial Sequence: Synthetic peptide
  N-term H or Acetyl
  MOD_RES (5)..(5): Modified Cys
  MOD_RES (7)..(7): Ser or Phospho-Ser
  See specification as filed for detailed description of substitutions and preferred embodiments
KLLRCSSRRIRR

SEQ ID NO: 3959 - protein, 21 aa, Artificial Sequence
  Description of Artificial Sequence: Synthetic peptide
  N-term H or Acetyl
  MOD_RES (7)..(7): Modified Cys
  MOD_RES (9)..(9): Thr or Phospho-Thr
  See specification as filed for detailed description of substitutions and preferred embodiments
KLPWWRCYTWVVERDVNTKQR

SEQ ID NO: 3960 - protein, 15 aa, Artificial Sequence
  Description of Artificial Sequence: Synthetic peptide
  N-term H or Acetyl
  MOD_RES (8)..(8): Thr or Phospho-Thr
  MOD_RES (10)..(10): Modified Cys
  See specification as filed for detailed description of substitutions and preferred embodiments
KLRPQRATSCVFAMF

SEQ ID NO: 3961 - protein, 19 aa, Artificial Sequence
  Description of Artificial Sequence: Synthetic peptide
  N-term H or Acetyl
  MOD_RES (5)..(5): Modified Cys
  MOD_RES (7)..(7): Thr or Phospho-Thr
  See specification as filed for detailed description of substitutions and preferred embodiments
KNDGCRTRSKGTLRYMSPE

SEQ ID NO: 3962 - protein, 19 aa, Artificial Sequence
  Description of Artificial Sequence: Synthetic peptide
  N-term H or Acetyl
  MOD_RES (7)..(7): Thr or Phospho-Thr
  MOD_RES (9)..(9): Modified Cys
  See specification as filed for detailed description of substitutions and preferred embodiments
KNDGKRTRCKGTLRYMSPE

SEQ ID NO: 3963 - protein, 19 aa, Artificial Sequence
  Description of Artificial Sequence: Synthetic peptide
  N-term H or Acetyl
  MOD_RES (10)..(10): Modified Cys
  MOD_RES (12)..(12): Thr or Phospho-Thr
  See specification as filed for detailed description of substitutions and preferred embodiments
KNDGKRTRSCGTLRYMSPE

SEQ ID NO: 3964 - protein, 19 aa, Artificial Sequence
  Description of Artificial Sequence: Synthetic peptide
  N-term H or Acetyl
  MOD_RES (12)..(12): Thr or Phospho-Thr
  MOD_RES (14)..(14): Modified Cys
  See specification as filed for detailed description of substitutions and preferred embodiments
KNDGKRTRSKGTLCYMSPE

SEQ ID NO: 3965 - protein, 15 aa, Artificial Sequence
  Description of Artificial Sequence: Synthetic peptide
  N-term H or Acetyl
  MOD_RES (6)..(6): Modified Cys
  MOD_RES (8)..(8): Thr or Phospho-Thr
  See specification as filed for detailed description of substitutions and preferred embodiments
KNIVTCRTPPPSQGK

SEQ ID NO: 3966 - protein, 15 aa, Artificial Sequence
  Description of Artificial Sequence: Synthetic peptide
  N-term H or Acetyl
  MOD_RES (8)..(8): Thr or Phospho-Thr
  MOD_RES (10)..(10): Modified Cys
  See specification as filed for detailed description of substitutions and preferred embodiments
KNIVTPRTPCPSQGK

SEQ ID NO: 3967 - protein, 15 aa, Artificial Sequence
  Description of Artificial Sequence: Synthetic peptide
  N-term H or Acetyl
  MOD_RES (10)..(10): Modified Cys
  MOD_RES (12)..(12): Ser or Phospho-Ser
  See specification as filed for detailed description of substitutions and preferred embodiments
KNIVTPRTPCPSQGK

SEQ ID NO: 3968 - protein, 18 aa, Artificial Sequence
  Description of Artificial Sequence: Synthetic peptide
  N-term H or Acetyl
  MOD_RES (14)..(14): Ser or Phospho-Ser
  MOD_RES (16)..(16): Modified Cys
  See specification as filed for detailed description of substitutions and preferred embodiments
KNKTTKKRPQRATSNCFS

SEQ ID NO: 3969 - protein, 18 aa, Artificial Sequence
  Description of Artificial Sequence: Synthetic peptide
  N-term H or Acetyl
  MOD_RES (16)..(16): Modified Cys
  MOD_RES (18)..(18): Ser or Phospho-Ser
  See specification as filed for detailed description of substitutions and preferred embodiments
KNKTTKKRPQRATSNCFS

SEQ ID NO: 3970 - protein, 15 aa, Artificial Sequence
  Description of Artificial Sequence: Synthetic peptide
  N-term H or Acetyl
  MOD_RES (8)..(8): Thr or Phospho-Thr
  MOD_RES (10)..(10): Modified Cys
  See specification as filed for detailed description of substitutions and preferred embodiments
KNRPQRATSCVFAMF

SEQ ID NO: 3971 - protein, 17 aa, Artificial Sequence
  Description of Artificial Sequence: Synthetic peptide
  N-term H or Acetyl
  MOD_RES (9)..(9): Thr or Phospho-Thr
  MOD_RES (11)..(11): Modified Cys
  See specification as filed for detailed description of substitutions and preferred embodiments
KPARKKRYTVCGNPYWM

SEQ ID NO: 3972 - protein, 18 aa, Artificial Sequence
  Description of Artificial Sequence: Synthetic peptide
  N-term H or Acetyl
  MOD_RES (14)..(14): Ser or Phospho-Ser
  MOD_RES (16)..(16): Modified Cys
  See specification as filed for detailed description of substitutions and preferred embodiments
KPKKKKKRPQRADSDCFA

SEQ ID NO: 3973 - protein, 18 aa, Artificial Sequence
  Description of Artificial Sequence: Synthetic peptide
  N-term H or Acetyl
  MOD_RES (14)..(14): Ser or Phospho-Ser
  MOD_RES (16)..(16): Modified Cys
  See specification as filed for detailed description of substitutions and preferred embodiments
KPKKKKKRPQRADSDCFS

SEQ ID NO: 3974 - protein, 18 aa, Artificial Sequence
  Description of Artificial Sequence: Synthetic peptide
  N-term H or Acetyl
  MOD_RES (14)..(14): Ser or Phospho-Ser
  MOD_RES (16)..(16): Modified Cys
  See specification as filed for detailed description of substitutions and preferred embodiments
KPKKKKKRPQRADSNCFA

SEQ ID NO: 3975 - protein, 18 aa, Artificial Sequence
  Description of Artificial Sequence: Synthetic peptide
  N-term H or Acetyl
  MOD_RES (14)..(14): Ser or Phospho-Ser
  MOD_RES (16)..(16): Modified Cys
  See specification as filed for detailed description of substitutions and preferred embodiments
KPKKKKKRPQRADSNCFS

SEQ ID NO: 3976 - protein, 18 aa, Artificial Sequence
  Description of Artificial Sequence: Synthetic peptide
  N-term H or Acetyl
  MOD_RES (16)..(16): Modified Cys
  MOD_RES (18)..(18): Ser or Phospho-Ser
  See specification as filed for detailed description of substitutions and preferred embodiments
KPKKKKKRPQRADSDCFS

SEQ ID NO: 3977 - protein, 18 aa, Artificial Sequence
  Description of Artificial Sequence: Synthetic peptide
  N-term H or Acetyl
  MOD_RES (16)..(16): Modified Cys
  MOD_RES (18)..(18): Ser or Phospho-Ser
  See specification as filed for detailed description of substitutions and preferred embodiments
KPKKKKKRPQRADSNCFS

SEQ ID NO: 3978 - protein, 18 aa, Artificial Sequence
  Description of Artificial Sequence: Synthetic peptide
  N-term H or Acetyl
  MOD_RES (14)..(14): Ser or Phospho-Ser
  MOD_RES (16)..(16): Modified Cys
  See specification as filed for detailed description of substitutions and preferred embodiments
KPKKKKKRPQRAESDCFA

SEQ ID NO: 3979 - protein, 18 aa, Artificial Sequence
  Description of Artificial Sequence: Synthetic peptide
  N-term H or Acetyl
  MOD_RES (14)..(14): Ser or Phospho-Ser
  MOD_RES (16)..(16): Modified Cys
  See specification as filed for detailed description of substitutions and preferred embodiments
KPKKKKKRPQRAESDCFS

SEQ ID NO: 3980 - protein, 18 aa, Artificial Sequence
  Description of Artificial Sequence: Synthetic peptide
  N-term H or Acetyl
  MOD_RES (14)..(14): Ser or Phospho-Ser
  MOD_RES (16)..(16): Modified Cys
  See specification as filed for detailed description of substitutions and preferred embodiments
KPKKKKKRPQRAESNCFA

SEQ ID NO: 3981 - protein, 18 aa, Artificial Sequence
  Description of Artificial Sequence: Synthetic peptide
  N-term H or Acetyl
  MOD_RES (14)..(14): Ser or Phospho-Ser
  MOD_RES (16)..(16): Modified Cys
  See specification as filed for detailed description of substitutions and preferred embodiments
KPKKKKKRPQRAESNCFS

SEQ ID NO: 3982 - protein, 18 aa, Artificial Sequence
  Description of Artificial Sequence: Synthetic peptide
  N-term H or Acetyl
  MOD_RES (16)..(16): Modified Cys
  MOD_RES (18)..(18): Ser or Phospho-Ser
  See specification as filed for detailed description of substitutions and preferred embodiments
KPKKKKKRPQRAESDCFS

SEQ ID NO: 3983 - protein, 18 aa, Artificial Sequence
  Description of Artificial Sequence: Synthetic peptide
  N-term H or Acetyl
  MOD_RES (16)..(16): Modified Cys
  MOD_RES (18)..(18): Ser or Phospho-Ser
  See specification as filed for detailed description of substitutions and preferred embodiments
KPKKKKKRPQRAESNCFS

SEQ ID NO: 3984 - protein, 18 aa, Artificial Sequence
  Description of Artificial Sequence: Synthetic peptide
  N-term H or Acetyl
  MOD_RES (14)..(14): Ser or Phospho-Ser
  MOD_RES (16)..(16): Modified Cys
  See specification as filed for detailed description of substitutions and preferred embodiments
KPKKKKKRPQRAHSDCFA

SEQ ID NO: 3985 - protein, 18 aa, Artificial Sequence
  Description of Artificial Sequence: Synthetic peptide
  N-term H or Acetyl
  MOD_RES (14)..(14): Ser or Phospho-Ser
  MOD_RES (16)..(16): Modified Cys
  See specification as filed for detailed description of substitutions and preferred embodiments
KPKKKKKRPQRAHSDCFS

SEQ ID NO: 3986 - protein, 18 aa, Artificial Sequence
  Description of Artificial Sequence: Synthetic peptide
  N-term H or Acetyl
  MOD_RES (14)..(14): Ser or Phospho-Ser
  MOD_RES (16)..(16): Modified Cys
  See specification as filed for detailed description of substitutions and preferred embodiments
KPKKKKKRPQRAHSNCFA

SEQ ID NO: 3987 - protein, 18 aa, Artificial Sequence
  Description of Artificial Sequence: Synthetic peptide
  N-term H or Acetyl
  MOD_RES (14)..(14): Ser or Phospho-Ser
  MOD_RES (16)..(16): Modified Cys
  See specification as filed for detailed description of substitutions and preferred embodiments
KPKKKKKRPQRAHSNCFS

SEQ ID NO: 3988 - protein, 18 aa, Artificial Sequence
  Description of Artificial Sequence: Synthetic peptide
  N-term H or Acetyl
  MOD_RES (16)..(16): Modified Cys
  MOD_RES (18)..(18): Ser or Phospho-Ser
  See specification as filed for detailed description of substitutions and preferred embodiments
KPKKKKKRPQRAHSDCFS

SEQ ID NO: 3989 - protein, 18 aa, Artificial Sequence
  Description of Artificial Sequence: Synthetic peptide
  N-term H or Acetyl
  MOD_RES (16)..(16): Modified Cys
  MOD_RES (18)..(18): Ser or Phospho-Ser
  See specification as filed for detailed description of substitutions and preferred embodiments
KPKKKKKRPQRAHSNCFS

SEQ ID NO: 3990 - protein, 18 aa, Artificial Sequence
  Description of Artificial Sequence: Synthetic peptide
  N-term H or Acetyl
  MOD_RES (14)..(14): Ser or Phospho-Ser
  MOD_RES (16)..(16): Modified Cys
  See specification as filed for detailed description of substitutions and preferred embodiments
KPKKKKKRPQRATSDCFA

SEQ ID NO: 3991 - protein, 18 aa, Artificial Sequence
  Description of Artificial Sequence: Synthetic peptide
  N-term H or Acetyl
  MOD_RES (14)..(14): Ser or Phospho-Ser
  MOD_RES (16)..(16): Modified Cys
  See specification as filed for detailed description of substitutions and preferred embodiments
KPKKKKKRPQRATSDCFS

SEQ ID NO: 3992 - protein, 18 aa, Artificial Sequence
  Description of Artificial Sequence: Synthetic peptide
  N-term H or Acetyl
  MOD_RES (14)..(14): Ser or Phospho-Ser
  MOD_RES (16)..(16): Modified Cys
  See specification as filed for detailed description of substitutions and preferred embodiments
KPKKKKKRPQRATSNCFA

SEQ ID NO: 3993 - protein, 18 aa, Artificial Sequence
  Description of Artificial Sequence: Synthetic peptide
  N-term H or Acetyl
  MOD_RES (14)..(14): Ser or Phospho-Ser
  MOD_RES (16)..(16): Modified Cys
  See specification as filed for detailed description of substitutions and preferred embodiments
KPKKKKKRPQRATSNCFS

SEQ ID NO: 3994 - protein, 18 aa, Artificial Sequence
  Description of Artificial Sequence: Synthetic peptide
  N-term H or Acetyl
  MOD_RES (16)..(16): Modified Cys
  MOD_RES (18)..(18): Ser or Phospho-Ser
  See specification as filed for detailed description of substitutions and preferred embodiments
KPKKKKKRPQRATSDCFS

SEQ ID NO: 3995 - protein, 18 aa, Artificial Sequence
  Description of Artificial Sequence: Synthetic peptide
  N-term H or Acetyl
  MOD_RES (16)..(16): Modified Cys
  MOD_RES (18)..(18): Ser or Phospho-Ser
  See specification as filed for detailed description of substitutions and preferred embodiments
KPKKKKKRPQRATSNCFS

SEQ ID NO: 3996 - protein, 18 aa, Artificial Sequence
  Description of Artificial Sequence: Synthetic peptide
  N-term H or Acetyl
  MOD_RES (14)..(14): Ser or Phospho-Ser
  MOD_RES (16)..(16): Modified Cys
  See specification as filed for detailed description of substitutions and preferred embodiments
KPKKRKKRPQRADSDCFA

SEQ ID NO: 3997 - protein, 18 aa, Artificial Sequence
  Description of Artificial Sequence: Synthetic peptide
  N-term H or Acetyl
  MOD_RES (14)..(14): Ser or Phospho-Ser
  MOD_RES (16)..(16): Modified Cys
  See specification as filed for detailed description of substitutions and preferred embodiments
KPKKRKKRPQRADSDCFS

SEQ ID NO: 3998 - protein, 18 aa, Artificial Sequence
  Description of Artificial Sequence: Synthetic peptide
  N-term H or Acetyl
  MOD_RES (14)..(14): Ser or Phospho-Ser
  MOD_RES (16)..(16): Modified Cys
  See specification as filed for detailed description of substitutions and preferred embodiments
KPKKRKKRPQRADSNCFA

SEQ ID NO: 3999 - protein, 18 aa, Artificial Sequence
  Description of Artificial Sequence: Synthetic peptide
  N-term H or Acetyl
  MOD_RES (14)..(14): Ser or Phospho-Ser
  MOD_RES (16)..(16): Modified Cys
  See specification as filed for detailed description of substitutions and preferred embodiments
KPKKRKKRPQRADSNCFS

SEQ ID NO: 4000 - protein, 18 aa, Artificial Sequence
  Description of Artificial Sequence: Synthetic peptide
  N-term H or Acetyl
  MOD_RES (16)..(16): Modified Cys
  MOD_RES (18)..(18): Ser or Phospho-Ser
  See specification as filed for detailed description of substitutions and preferred embodiments
KPKKRKKRPQRADSDCFS

SEQ ID NO: 4001 - protein, 18 aa, Artificial Sequence
  Description of Artificial Sequence: Synthetic peptide
  N-term H or Acetyl
  MOD_RES (16)..(16): Modified Cys
  MOD_RES (18)..(18): Ser or Phospho-Ser
  See specification as filed for detailed description of substitutions and preferred embodiments
KPKKRKKRPQRADSNCFS

SEQ ID NO: 4002 - protein, 18 aa, Artificial Sequence
  Description of Artificial Sequence: Synthetic peptide
  N-term H or Acetyl
  MOD_RES (14)..(14): Ser or Phospho-Ser
  MOD_RES (16)..(16): Modified Cys
  See specification as filed for detailed description of substitutions and preferred embodiments
KPKKRKKRPQRAESDCFA

SEQ ID NO: 4003 - protein, 18 aa, Artificial Sequence
  Description of Artificial Sequence: Synthetic peptide
  N-term H or Acetyl
  MOD_RES (14)..(14): Ser or Phospho-Ser
  MOD_RES (16)..(16): Modified Cys
  See specification as filed for detailed description of substitutions and preferred embodiments
KPKKRKKRPQRAESDCFS

SEQ ID NO: 4004 - protein, 18 aa, Artificial Sequence
  Description of Artificial Sequence: Synthetic peptide
  N-term H or Acetyl
  MOD_RES (14)..(14): Ser or Phospho-Ser
  MOD_RES (16)..(16): Modified Cys
  See specification as filed for detailed description of substitutions and preferred embodiments
KPKKRKKRPQRAESNCFA

SEQ ID NO: 4005 - protein, 18 aa, Artificial Sequence
  Description of Artificial Sequence: Synthetic peptide
  N-term H or Acetyl
  MOD_RES (14)..(14): Ser or Phospho-Ser
  MOD_RES (16)..(16): Modified Cys
  See specification as filed for detailed description of substitutions and preferred embodiments
KPKKRKKRPQRAESNCFS

SEQ ID NO: 4006 - protein, 18 aa, Artificial Sequence
  Description of Artificial Sequence: Synthetic peptide
  N-term H or Acetyl
  MOD_RES (16)..(16): Modified Cys
  MOD_RES (18)..(18): Ser or Phospho-Ser
  See specification as filed for detailed description of substitutions and preferred embodiments
KPKKRKKRPQRAESDCFS

SEQ ID NO: 4007 - protein, 18 aa, Artificial Sequence
  Description of Artificial Sequence: Synthetic peptide
  N-term H or Acetyl
  MOD_RES (16)..(16): Modified Cys
  MOD_RES (18)..(18): Ser or Phospho-Ser
  See specification as filed for detailed description of substitutions and preferred embodiments
KPKKRKKRPQRAESNCFS

SEQ ID NO: 4008 - protein, 18 aa, Artificial Sequence
  Description of Artificial Sequence: Synthetic peptide
  N-term H or Acetyl
  MOD_RES (14)..(14): Ser or Phospho-Ser
  MOD_RES (16)..(16): Modified Cys
  See specification as filed for detailed description of substitutions and preferred embodiments
KPKKRKKRPQRAHSDCFA

SEQ ID NO: 4009 - protein, 18 aa, Artificial Sequence
  Description of Artificial Sequence: Synthetic peptide
  N-term H or Acetyl
  MOD_RES (14)..(14): Ser or Phospho-Ser
  MOD_RES (16)..(16): Modified Cys
  See specification as filed for detailed description of substitutions and preferred embodiments
KPKKRKKRPQRAHSDCFS

SEQ ID NO: 4010 - protein, 18 aa, Artificial Sequence
  Description of Artificial Sequence: Synthetic peptide
  N-term H or Acetyl
  MOD_RES (14)..(14): Ser or Phospho-Ser
  MOD_RES (16)..(16): Modified Cys
  See specification as filed for detailed description of substitutions and preferred embodiments
KPKKRKKRPQRAHSNCFA

SEQ ID NO: 4011 - protein, 18 aa, Artificial Sequence
  Description of Artificial Sequence: Synthetic peptide
  N-term H or Acetyl
  MOD_RES (14)..(14): Ser or Phospho-Ser
  MOD_RES (16)..(16): Modified Cys
  See specification as filed for detailed description of substitutions and preferred embodiments
KPKKRKKRPQRAHSNCFS

SEQ ID NO: 4012 - protein, 18 aa, Artificial Sequence
  Description of Artificial Sequence: Synthetic peptide
  N-term H or Acetyl
  MOD_RES (16)..(16): Modified Cys
  MOD_RES (18)..(18): Ser or Phospho-Ser
  See specification as filed for detailed description of substitutions and preferred embodiments
KPKKRKKRPQRAHSDCFS

SEQ ID NO: 4013 - protein, 18 aa, Artificial Sequence
  Description of Artificial Sequence: Synthetic peptide
  N-term H or Acetyl
  MOD_RES (16)..(16): Modified Cys
  MOD_RES (18)..(18): Ser or Phospho-Ser
  See specification as filed for detailed description of substitutions and preferred embodiments
KPKKRKKRPQRAHSNCFS

SEQ ID NO: 4014 - protein, 18 aa, Artificial Sequence
  Description of Artificial Sequence: Synthetic peptide
  N-term H or Acetyl
  MOD_RES (14)..(14): Ser or Phospho-Ser
  MOD_RES (16)..(16): Modified Cys
  See specification as filed for detailed description of substitutions and preferred embodiments
KPKKRKKRPQRATSDCFA

SEQ ID NO: 4015 - protein, 18 aa, Artificial Sequence
  Description of Artificial Sequence: Synthetic peptide
  N-term H or Acetyl
  MOD_RES (14)..(14): Ser or Phospho-Ser
  MOD_RES (16)..(16): Modified Cys
  See specification as filed for detailed description of substitutions and preferred embodiments
KPKKRKKRPQRATSDCFS

SEQ ID NO: 4016 - protein, 18 aa, Artificial Sequence
  Description of Artificial Sequence: Synthetic peptide
  N-term H or Acetyl
  MOD_RES (14)..(14): Ser or Phospho-Ser
  MOD_RES (16)..(16): Modified Cys
  See specification as filed for detailed description of substitutions and preferred embodiments
KPKKRKKRPQRATSNCFA

SEQ ID NO: 4017 - protein, 18 aa, Artificial Sequence
  Description of Artificial Sequence: Synthetic peptide
  N-term H or Acetyl
  MOD_RES (14)..(14): Ser or Phospho-Ser
  MOD_RES (16)..(16): Modified Cys
  See specification as filed for detailed description of substitutions and preferred embodiments
KPKKRKKRPQRATSNCFS

SEQ ID NO: 4018 - protein, 18 aa, Artificial Sequence
  Description of Artificial Sequence: Synthetic peptide
  N-term H or Acetyl
  MOD_RES (16)..(16): Modified Cys
  MOD_RES (18)..(18): Ser or Phospho-Ser
  See specification as filed for detailed description of substitutions and preferred embodiments
KPKKRKKRPQRATSDCFS

SEQ ID NO: 4019 - protein, 18 aa, Artificial Sequence
  Description of Artificial Sequence: Synthetic peptide
  N-term H or Acetyl
  MOD_RES (16)..(16): Modified Cys
  MOD_RES (18)..(18): Ser or Phospho-Ser
  See specification as filed for detailed description of substitutions and preferred embodiments
KPKKRKKRPQRATSNCFS

SEQ ID NO: 4020 - protein, 18 aa, Artificial Sequence
  Description of Artificial Sequence: Synthetic peptide
  N-term H or Acetyl
  MOD_RES (14)..(14): Ser or Phospho-Ser
  MOD_RES (16)..(16): Modified Cys
  See specification as filed for detailed description of substitutions and preferred embodiments
KPKKTKKRPQRADSDCFA

SEQ ID NO: 4021 - protein, 18 aa, Artificial Sequence
  Description of Artificial Sequence: Synthetic peptide
  N-term H or Acetyl
  MOD_RES (14)..(14): Ser or Phospho-Ser
  MOD_RES (16)..(16): Modified Cys
  See specification as filed for detailed description of substitutions and preferred embodiments
KPKKTKKRPQRADSDCFS

SEQ ID NO: 4022 - protein, 18 aa, Artificial Sequence
  Description of Artificial Sequence: Synthetic peptide
  N-term H or Acetyl
  MOD_RES (14)..(14): Ser or Phospho-Ser
  MOD_RES (16)..(16): Modified Cys
  See specification as filed for detailed description of substitutions and preferred embodiments
KPKKTKKRPQRADSNCFA

SEQ ID NO: 4023 - protein, 18 aa, Artificial Sequence
  Description of Artificial Sequence: Synthetic peptide
  N-term H or Acetyl
  MOD_RES (14)..(14): Ser or Phospho-Ser
  MOD_RES (16)..(16): Modified Cys
  See specification as filed for detailed description of substitutions and preferred embodiments
KPKKTKKRPQRADSNCFS

SEQ ID NO: 4024 - protein, 18 aa, Artificial Sequence
  Description of Artificial Sequence: Synthetic peptide
  N-term H or Acetyl
  MOD_RES (16)..(16): Modified Cys
  MOD_RES (18)..(18): Ser or Phospho-Ser
  See specification as filed for detailed description of substitutions and preferred embodiments
KPKKTKKRPQRADSDCFS

SEQ ID NO: 4025 - protein, 18 aa, Artificial Sequence
  Description of Artificial Sequence: Synthetic peptide
  N-term H or Acetyl
  MOD_RES (16)..(16): Modified Cys
  MOD_RES (18)..(18): Ser or Phospho-Ser
  See specification as filed for detailed description of substitutions and preferred embodiments
KPKKTKKRPQRADSNCFS

SEQ ID NO: 4026 - protein, 18 aa, Artificial Sequence
  Description of Artificial Sequence: Synthetic peptide
  N-term H or Acetyl
  MOD_RES (14)..(14): Ser or Phospho-Ser
  MOD_RES (16)..(16): Modified Cys
  See specification as filed for detailed description of substitutions and preferred embodiments
KPKKTKKRPQRAESDCFA

SEQ ID NO: 4027 - protein, 18 aa, Artificial Sequence
  Description of Artificial Sequence: Synthetic peptide
  N-term H or Acetyl
  MOD_RES (14)..(14): Ser or Phospho-Ser
  MOD_RES (16)..(16): Modified Cys
  See specification as filed for detailed description of substitutions and preferred embodiments
KPKKTKKRPQRAESDCFS

SEQ ID NO: 4028 - protein, 18 aa, Artificial Sequence
  Description of Artificial Sequence: Synthetic peptide
  N-term H or Acetyl
  MOD_RES (14)..(14): Ser or Phospho-Ser
  MOD_RES (16)..(16): Modified Cys
  See specification as filed for detailed description of substitutions and preferred embodiments
KPKKTKKRPQRAESNCFA

SEQ ID NO: 4029 - protein, 18 aa, Artificial Sequence
  Description of Artificial Sequence: Synthetic peptide
  N-term H or Acetyl
  MOD_RES (14)..(14): Ser or Phospho-Ser
  MOD_RES (16)..(16): Modified Cys
  See specification as filed for detailed description of substitutions and preferred embodiments
KPKKTKKRPQRAESNCFS

SEQ ID NO: 4030 - protein, 18 aa, Artificial Sequence
  Description of Artificial Sequence: Synthetic peptide
  N-term H or Acetyl
  MOD_RES (16)..(16): Modified Cys
  MOD_RES (18)..(18): Ser or Phospho-Ser
  See specification as filed for detailed description of substitutions and preferred embodiments
KPKKTKKRPQRAESDCFS

SEQ ID NO: 4031 - protein, 18 aa, Artificial Sequence
  Description of Artificial Sequence: Synthetic peptide
  N-term H or Acetyl
  MOD_RES (16)..(16): Modified Cys
  MOD_RES (18)..(18): Ser or Phospho-Ser
  See specification as filed for detailed description of substitutions and preferred embodiments
KPKKTKKRPQRAESNCFS

SEQ ID NO: 4032 - protein, 18 aa, Artificial Sequence
  Description of Artificial Sequence: Synthetic peptide
  N-term H or Acetyl
  MOD_RES (14)..(14): Ser or Phospho-Ser
  MOD_RES (16)..(16): Modified Cys
  See specification as filed for detailed description of substitutions and preferred embodiments
KPKKTKKRPQRAHSDCFA

SEQ ID NO: 4033 - protein, 18 aa, Artificial Sequence
  Description of Artificial Sequence: Synthetic peptide
  N-term H or Acetyl
  MOD_RES (14)..(14): Ser or Phospho-Ser
  MOD_RES (16)..(16): Modified Cys
  See specification as filed for detailed description of substitutions and preferred embodiments
KPKKTKKRPQRAHSDCFS

SEQ ID NO: 4034 - protein, 18 aa, Artificial Sequence
  Description of Artificial Sequence: Synthetic peptide
  N-term H or Acetyl
  MOD_RES (14)..(14): Ser or Phospho-Ser
  MOD_RES (16)..(16): Modified Cys
  See specification as filed for detailed description of substitutions and preferred embodiments
KPKKTKKRPQRAHSNCFA

SEQ ID NO: 4035 - protein, 18 aa, Artificial Sequence
  Description of Artificial Sequence: Synthetic peptide
  N-term H or Acetyl
  MOD_RES (14)..(14): Ser or Phospho-Ser
  MOD_RES (16)..(16): Modified Cys
  See specification as filed for detailed description of substitutions and preferred embodiments
KPKKTKKRPQRAHSNCFS

SEQ ID NO: 4036 - protein, 18 aa, Artificial Sequence
  Description of Artificial Sequence: Synthetic peptide
  N-term H or Acetyl
  MOD_RES (16)..(16): Modified Cys
  MOD_RES (18)..(18): Ser or Phospho-Ser
  See specification as filed for detailed description of substitutions and preferred embodiments
KPKKTKKRPQRAHSDCFS

SEQ ID NO: 4037 - protein, 18 aa, Artificial Sequence
  Description of Artificial Sequence: Synthetic peptide
  N-term H or Acetyl
  MOD_RES (16)..(16): Modified Cys
  MOD_RES (18)..(18): Ser or Phospho-Ser
  See specification as filed for detailed description of substitutions and preferred embodiments
KPKKTKKRPQRAHSNCFS

SEQ ID NO: 4038 - protein, 18 aa, Artificial Sequence
  Description of Artificial Sequence: Synthetic peptide
  N-term H or Acetyl
  MOD_RES (14)..(14): Ser or Phospho-Ser
  MOD_RES (16)..(16): Modified Cys
  See specification as filed for detailed description of substitutions and preferred embodiments
KPKKTKKRPQRATSDCFA

SEQ ID NO: 4039 - protein, 18 aa, Artificial Sequence
  Description of Artificial Sequence: Synthetic peptide
  N-term H or Acetyl
  MOD_RES (14)..(14): Ser or Phospho-Ser
  MOD_RES (16)..(16): Modified Cys
  See specification as filed for detailed description of substitutions and preferred embodiments
KPKKTKKRPQRATSDCFS

SEQ ID NO: 4040 - protein, 18 aa, Artificial Sequence
  Description of Artificial Sequence: Synthetic peptide
  N-term H or Acetyl
  MOD_RES (14)..(14): Ser or Phospho-Ser
  MOD_RES (16)..(16): Modified Cys
  See specification as filed for detailed description of substitutions and preferred embodiments
KPKKTKKRPQRATSNCFA

SEQ ID NO: 4041 - protein, 18 aa, Artificial Sequence
  Description of Artificial Sequence: Synthetic peptide
  N-term H or Acetyl
  MOD_RES (14)..(14): Ser or Phospho-Ser
  MOD_RES (16)..(16): Modified Cys
  See specification as filed for detailed description of substitutions and preferred embodiments
KPKKTKKRPQRATSNCFS

SEQ ID NO: 4042 - protein, 18 aa, Artificial Sequence
  Description of Artificial Sequence: Synthetic peptide
  N-term H or Acetyl
  MOD_RES (16)..(16): Modified Cys
  MOD_RES (18)..(18): Ser or Phospho-Ser
  See specification as filed for detailed description of substitutions and preferred embodiments
KPKKTKKRPQRATSDCFS

SEQ ID NO: 4043 - protein, 18 aa, Artificial Sequence
  Description of Artificial Sequence: Synthetic peptide
  N-term H or Acetyl
  MOD_RES (16)..(16): Modified Cys
  MOD_RES (18)..(18): Ser or Phospho-Ser
  See specification as filed for detailed description of substitutions and preferred embodiments
KPKKTKKRPQRATSNCFS

SEQ ID NO: 4044 - protein, 18 aa, Artificial Sequence
  Description of Artificial Sequence: Synthetic peptide
  N-term H or Acetyl
  MOD_RES (14)..(14): Ser or Phospho-Ser
  MOD_RES (16)..(16): Modified Cys
  See specification as filed for detailed description of substitutions and preferred embodiments
KPKKVKKRPQRADSDCFA

SEQ ID NO: 4045 - protein, 18 aa, Artificial Sequence
  Description of Artificial Sequence: Synthetic peptide
  N-term H or Acetyl
  MOD_RES (14)..(14): Ser or Phospho-Ser
  MOD_RES (16)..(16): Modified Cys
  See specification as filed for detailed description of substitutions and preferred embodiments
KPKKVKKRPQRADSDCFS

SEQ ID NO: 4046 - protein, 18 aa, Artificial Sequence
  Description of Artificial Sequence: Synthetic peptide
  N-term H or Acetyl
  MOD_RES (14)..(14): Ser or Phospho-Ser
  MOD_RES (16)..(16): Modified Cys
  See specification as filed for detailed description of substitutions and preferred embodiments
KPKKVKKRPQRADSNCFA

SEQ ID NO: 4047 - protein, 18 aa, Artificial Sequence
  Description of Artificial Sequence: Synthetic peptide
  N-term H or Acetyl
  MOD_RES (14)..(14): Ser or Phospho-Ser
  MOD_RES (16)..(16): Modified Cys
  See specification as filed for detailed description of substitutions and preferred embodiments
KPKKVKKRPQRADSNCFS

SEQ ID NO: 4048 - protein, 18 aa, Artificial Sequence
  Description of Artificial Sequence: Synthetic peptide
  N-term H or Acetyl
  MOD_RES (16)..(16): Modified Cys
  MOD_RES (18)..(18): Ser or Phospho-Ser
  See specification as filed for detailed description of substitutions and preferred embodiments
KPKKVKKRPQRADSDCFS

SEQ ID NO: 4049 - protein, 18 aa, Artificial Sequence
  Description of Artificial Sequence: Synthetic peptide
  N-term H or Acetyl
  MOD_RES (16)..(16): Modified Cys
  MOD_RES (18)..(18): Ser or Phospho-Ser
  See specification as filed for detailed description of substitutions and preferred embodiments
KPKKVKKRPQRADSNCFS

SEQ ID NO: 4050 - protein, 18 aa, Artificial Sequence
  Description of Artificial Sequence: Synthetic peptide
  N-term H or Acetyl
  MOD_RES (14)..(14): Ser or Phospho-Ser
  MOD_RES (16)..(16): Modified Cys
  See specification as filed for detailed description of substitutions and preferred embodiments
KPKKVKKRPQRAESDCFA

SEQ ID NO: 4051 - protein, 18 aa, Artificial Sequence
  Description of Artificial Sequence: Synthetic peptide
  N-term H or Acetyl
  MOD_RES (14)..(14): Ser or Phospho-Ser
  MOD_RES (16)..(16): Modified Cys
  See specification as filed for detailed description of substitutions and preferred embodiments
KPKKVKKRPQRAESDCFS

SEQ ID NO: 4052 - protein, 18 aa, Artificial Sequence
  Description of Artificial Sequence: Synthetic peptide
  N-term H or Acetyl
  MOD_RES (14)..(14): Ser or Phospho-Ser
  MOD_RES (16)..(16): Modified Cys
  See specification as filed for detailed description of substitutions and preferred embodiments
KPKKVKKRPQRAESNCFA

SEQ ID NO: 4053 - protein, 18 aa, Artificial Sequence
  Description of Artificial Sequence: Synthetic peptide
  N-term H or Acetyl
  MOD_RES (14)..(14): Ser or Phospho-Ser
  MOD_RES (16)..(16): Modified Cys
  See specification as filed for detailed description of substitutions and preferred embodiments
KPKKVKKRPQRAESNCFS

SEQ ID NO: 4054 - protein, 18 aa, Artificial Sequence
  Description of Artificial Sequence: Synthetic peptide
  N-term H or Acetyl
  MOD_RES (16)..(16): Modified Cys
  MOD_RES (18)..(18): Ser or Phospho-Ser
  See specification as filed for detailed description of substitutions and preferred embodiments
KPKKVKKRPQRAESDCFS

SEQ ID NO: 4055 - protein, 18 aa, Artificial Sequence
  Description of Artificial Sequence: Synthetic peptide
  N-term H or Acetyl
  MOD_RES (16)..(16): Modified Cys
  MOD_RES (18)..(18): Ser or Phospho-Ser
  See specification as filed for detailed description of substitutions and preferred embodiments
KPKKVKKRPQRAESNCFS

SEQ ID NO: 4056 - protein, 18 aa, Artificial Sequence
  Description of Artificial Sequence: Synthetic peptide
  N-term H or Acetyl
  MOD_RES (14)..(14): Ser or Phospho-Ser
  MOD_RES (16)..(16): Modified Cys
  See specification as filed for detailed description of substitutions and preferred embodiments
KPKKVKKRPQRAHSDCFA

SEQ ID NO: 4057 - protein, 18 aa, Artificial Sequence
  Description of Artificial Sequence: Synthetic peptide
  N-term H or Acetyl
  MOD_RES (14)..(14): Ser or Phospho-Ser
  MOD_RES (16)..(16): Modified Cys
  See specification as filed for detailed description of substitutions and preferred embodiments
KPKKVKKRPQRAHSDCFS

SEQ ID NO: 4058 - protein, 18 aa, Artificial Sequence
  Description of Artificial Sequence: Synthetic peptide
  N-term H or Acetyl
  MOD_RES (14)..(14): Ser or Phospho-Ser
  MOD_RES (16)..(16): Modified Cys
  See specification as filed for detailed description of substitutions and preferred embodiments
KPKKVKKRPQRAHSNCFA

SEQ ID NO: 4059 - protein, 18 aa, Artificial Sequence
  Description of Artificial Sequence: Synthetic peptide
  N-term H or Acetyl
  MOD_RES (14)..(14): Ser or Phospho-Ser
  MOD_RES (16)..(16): Modified Cys
  See specification as filed for detailed description of substitutions and preferred embodiments
KPKKVKKRPQRAHSNCFS

SEQ ID NO: 4060 - protein, 18 aa, Artificial Sequence
  Description of Artificial Sequence: Synthetic peptide
  N-term H or Acetyl
  MOD_RES (16)..(16): Modified Cys
  MOD_RES (18)..(18): Ser or Phospho-Ser
  See specification as filed for detailed description of substitutions and preferred embodiments
KPKKVKKRPQRAHSDCFS

SEQ ID NO: 4061 - protein, 18 aa, Artificial Sequence
  Description of Artificial Sequence: Synthetic peptide
  N-term H or Acetyl
  MOD_RES (16)..(16): Modified Cys
  MOD_RES (18)..(18): Ser or Phospho-Ser
  See specification as filed for detailed description of substitutions and preferred embodiments
KPKKVKKRPQRAHSNCFS

SEQ ID NO: 4062 - protein, 18 aa, Artificial Sequence
  Description of Artificial Sequence: Synthetic peptide
  N-term H or Acetyl
  MOD_RES (14)..(14): Ser or Phospho-Ser
  MOD_RES (16)..(16): Modified Cys
  See specification as filed for detailed description of substitutions and preferred embodiments
KPKKVKKRPQRATSDCFA

SEQ ID NO: 4063 - protein, 18 aa, Artificial Sequence
  Description of Artificial Sequence: Synthetic peptide
  N-term H or Acetyl
  MOD_RES (14)..(14): Ser or Phospho-Ser
  MOD_RES (16)..(16): Modified Cys
  See specification as filed for detailed description of substitutions and preferred embodiments
KPKKVKKRPQRATSDCFS

SEQ ID NO: 4064 - protein, 18 aa, Artificial Sequence
  Description of Artificial Sequence: Synthetic peptide
  N-term H or Acetyl
  MOD_RES (14)..(14): Ser or Phospho-Ser
  MOD_RES (16)..(16): Modified Cys
  See specification as filed for detailed description of substitutions and preferred embodiments
KPKKVKKRPQRATSNCFA

SEQ ID NO: 4065 - protein, 18 aa, Artificial Sequence
  Description of Artificial Sequence: Synthetic peptide
  N-term H or Acetyl
  MOD_RES (14)..(14): Ser or Phospho-Ser
  MOD_RES (16)..(16): Modified Cys
  See specification as filed for detailed description of substitutions and preferred embodiments
KPKKVKKRPQRATSNCFS

SEQ ID NO: 4066 - protein, 18 aa, Artificial Sequence
  Description of Artificial Sequence: Synthetic peptide
  N-term H or Acetyl
  MOD_RES (16)..(16): Modified Cys
  MOD_RES (18)..(18): Ser or Phospho-Ser
  See specification as filed for detailed description of substitutions and preferred embodiments
KPKKVKKRPQRATSDCFS

SEQ ID NO: 4067 - protein, 18 aa, Artificial Sequence
  Description of Artificial Sequence: Synthetic peptide
  N-term H or Acetyl
  MOD_RES (16)..(16): Modified Cys
  MOD_RES (18)..(18): Ser or Phospho-Ser
  See specification as filed for detailed description of substitutions and preferred embodiments
KPKKVKKRPQRATSNCFS

SEQ ID NO: 4068 - protein, 18 aa, Artificial Sequence
  Description of Artificial Sequence: Synthetic peptide
  N-term H or Acetyl
  MOD_RES (14)..(14): Ser or Phospho-Ser
  MOD_RES (16)..(16): Modified Cys
  See specification as filed for detailed description of substitutions and preferred embodiments
KPKTKKKRPQRADSDCFA

SEQ ID NO: 4069 - protein, 18 aa, Artificial Sequence
  Description of Artificial Sequence: Synthetic peptide
  N-term H or Acetyl
  MOD_RES (14)..(14): Ser or Phospho-Ser
  MOD_RES (16)..(16): Modified Cys
  See specification as filed for detailed description of substitutions and preferred embodiments
KPKTKKKRPQRADSDCFS

SEQ ID NO: 4070 - protein, 18 aa, Artificial Sequence
  Description of Artificial Sequence: Synthetic peptide
  N-term H or Acetyl
  MOD_RES (14)..(14): Ser or Phospho-Ser
  MOD_RES (16)..(16): Modified Cys
  See specification as filed for detailed description of substitutions and preferred embodiments
KPKTKKKRPQRADSNCFA

SEQ ID NO: 4071 - protein, 18 aa, Artificial Sequence
  Description of Artificial Sequence: Synthetic peptide
  N-term H or Acetyl
  MOD_RES (14)..(14): Ser or Phospho-Ser
  MOD_RES (16)..(16): Modified Cys
  See specification as filed for detailed description of substitutions and preferred embodiments
KPKTKKKRPQRADSNCFS

SEQ ID NO: 4072 - protein, 18 aa, Artificial Sequence
  Description of Artificial Sequence: Synthetic peptide
  N-term H or Acetyl
  MOD_RES (16)..(16): Modified Cys
  MOD_RES (18)..(18): Ser or Phospho-Ser
  See specification as filed for detailed description of substitutions and preferred embodiments
KPKTKKKRPQRADSDCFS

SEQ ID NO: 4073 - protein, 18 aa, Artificial Sequence
  Description of Artificial Sequence: Synthetic peptide
  N-term H or Acetyl
  MOD_RES (16)..(16): Modified Cys
  MOD_RES (18)..(18): Ser or Phospho-Ser
  See specification as filed for detailed description of substitutions and preferred embodiments
KPKTKKKRPQRADSNCFS

SEQ ID NO: 4074 - protein, 18 aa, Artificial Sequence
  Description of Artificial Sequence: Synthetic peptide
  N-term H or Acetyl
  MOD_RES (14)..(14): Ser or Phospho-Ser
  MOD_RES (16)..(16): Modified Cys
  See specification as filed for detailed description of substitutions and preferred embodiments
KPKTKKKRPQRAESDCFA

SEQ ID NO: 4075 - protein, 18 aa, Artificial Sequence
  Description of Artificial Sequence: Synthetic peptide
  N-term H or Acetyl
  MOD_RES (14)..(14): Ser or Phospho-Ser
  MOD_RES (16)..(16): Modified Cys
  See specification as filed for detailed description of substitutions and preferred embodiments
KPKTKKKRPQRAESDCFS

SEQ ID NO: 4076 - protein, 18 aa, Artificial Sequence
  Description of Artificial Sequence: Synthetic peptide
  N-term H or Acetyl
  MOD_RES (14)..(14): Ser or Phospho-Ser
  MOD_RES (16)..(16): Modified Cys
  See specification as filed for detailed description of substitutions and preferred embodiments
KPKTKKKRPQRAESNCFA

SEQ ID NO: 4077 - protein, 18 aa, Artificial Sequence
  Description of Artificial Sequence: Synthetic peptide
  N-term H or Acetyl
  MOD_RES (14)..(14): Ser or Phospho-Ser
  MOD_RES (16)..(16): Modified Cys
  See specification as filed for detailed description of substitutions and preferred embodiments
KPKTKKKRPQRAESNCFS

SEQ ID NO: 4078 - protein, 18 aa, Artificial Sequence
  Description of Artificial Sequence: Synthetic peptide
  N-term H or Acetyl
  MOD_RES (16)..(16): Modified Cys
  MOD_RES (18)..(18): Ser or Phospho-Ser
  See specification as filed for detailed description of substitutions and preferred embodiments
KPKTKKKRPQRAESDCFS

SEQ ID NO: 4079 - protein, 18 aa, Artificial Sequence
  Description of Artificial Sequence: Synthetic peptide
  N-term H or Acetyl
  MOD_RES (16)..(16): Modified Cys
  MOD_RES (18)..(18): Ser or Phospho-Ser
  See specification as filed for detailed description of substitutions and preferred embodiments
KPKTKKKRPQRAESNCFS

SEQ ID NO: 4080 - protein, 18 aa, Artificial Sequence
  Description of Artificial Sequence: Synthetic peptide
  N-term H or Acetyl
  MOD_RES (14)..(14): Ser or Phospho-Ser
  MOD_RES (16)..(16): Modified Cys
  See specification as filed for detailed description of substitutions and preferred embodiments
KPKTKKKRPQRAHSDCFA

SEQ ID NO: 4081 - protein, 18 aa, Artificial Sequence
  Description of Artificial Sequence: Synthetic peptide
  N-term H or Acetyl
  MOD_RES (14)..(14): Ser or Phospho-Ser
  MOD_RES (16)..(16): Modified Cys
  See specification as filed for detailed description of substitutions and preferred embodiments
KPKTKKKRPQRAHSDCFS

SEQ ID NO: 4082 - protein, 18 aa, Artificial Sequence
  Description of Artificial Sequence: Synthetic peptide
  N-term H or Acetyl
  MOD_RES (14)..(14): Ser or Phospho-Ser
  MOD_RES (16)..(16): Modified Cys
  See specification as filed for detailed description of substitutions and preferred embodiments
KPKTKKKRPQRAHSNCFA

SEQ ID NO: 4083 - protein, 18 aa, Artificial Sequence
  Description of Artificial Sequence: Synthetic peptide
  N-term H or Acetyl
  MOD_RES (14)..(14): Ser or Phospho-Ser
  MOD_RES (16)..(16): Modified Cys
  See specification as filed for detailed description of substitutions and preferred embodiments
KPKTKKKRPQRAHSNCFS

SEQ ID NO: 4084 - protein, 18 aa, Artificial Sequence
  Description of Artificial Sequence: Synthetic peptide
  N-term H or Acetyl
  MOD_RES (16)..(16): Modified Cys
  MOD_RES (18)..(18): Ser or Phospho-Ser
  See specification as filed for detailed description of substitutions and preferred embodiments
KPKTKKKRPQRAHSDCFS

SEQ ID NO: 4085 - protein, 18 aa, Artificial Sequence
  Description of Artificial Sequence: Synthetic peptide
  N-term H or Acetyl
  MOD_RES (16)..(16): Modified Cys
  MOD_RES (18)..(18): Ser or Phospho-Ser
  See specification as filed for detailed description of substitutions and preferred embodiments
KPKTKKKRPQRAHSNCFS

SEQ ID NO: 4086 - protein, 18 aa, Artificial Sequence
  Description of Artificial Sequence: Synthetic peptide
  N-term H or Acetyl
  MOD_RES (14)..(14): Ser or Phospho-Ser
  MOD_RES (16)..(16): Modified Cys
  See specification as filed for detailed description of substitutions and preferred embodiments
KPKTKKKRPQRATSDCFA

SEQ ID NO: 4087 - protein, 18 aa, Artificial Sequence
  Description of Artificial Sequence: Synthetic peptide
  N-term H or Acetyl
  MOD_RES (14)..(14): Ser or Phospho-Ser
  MOD_RES (16)..(16): Modified Cys
  See specification as filed for detailed description of substitutions and preferred embodiments
KPKTKKKRPQRATSDCFS

SEQ ID NO: 4088 - protein, 18 aa, Artificial Sequence
  Description of Artificial Sequence: Synthetic peptide
  N-term H or Acetyl
  MOD_RES (14)..(14): Ser or Phospho-Ser
  MOD_RES (16)..(16): Modified Cys
  See specification as filed for detailed description of substitutions and preferred embodiments
KPKTKKKRPQRATSNCFA

SEQ ID NO: 4089 - protein, 18 aa, Artificial Sequence
  Description of Artificial Sequence: Synthetic peptide
  N-term H or Acetyl
  MOD_RES (14)..(14): Ser or Phospho-Ser
  MOD_RES (16)..(16): Modified Cys
  See specification as filed for detailed description of substitutions and preferred embodiments
KPKTKKKRPQRATSNCFS

SEQ ID NO: 4090 - protein, 18 aa, Artificial Sequence
  Description of Artificial Sequence: Synthetic peptide
  N-term H or Acetyl
  MOD_RES (16)..(16): Modified Cys
  MOD_RES (18)..(18): Ser or Phospho-Ser
  See specification as filed for detailed description of substitutions and preferred embodiments
KPKTKKKRPQRATSDCFS

SEQ ID NO: 4091 - protein, 18 aa, Artificial Sequence
  Description of Artificial Sequence: Synthetic peptide
  N-term H or Acetyl
  MOD_RES (16)..(16): Modified Cys
  MOD_RES (18)..(18): Ser or Phospho-Ser
  See specification as filed for detailed description of substitutions and preferred embodiments
KPKTKKKRPQRATSNCFS

SEQ ID NO: 4092 - protein, 18 aa, Artificial Sequence
  Description of Artificial Sequence: Synthetic peptide
  N-term H or Acetyl
  MOD_RES (14)..(14): Ser or Phospho-Ser
  MOD_RES (16)..(16): Modified Cys
  See specification as filed for detailed description of substitutions and preferred embodiments
KPKTRKKRPQRADSDCFA

SEQ ID NO: 4093 - protein, 18 aa, Artificial Sequence
  Description of Artificial Sequence: Synthetic peptide
  N-term H or Acetyl
  MOD_RES (14)..(14): Ser or Phospho-Ser
  MOD_RES (16)..(16): Modified Cys
  See specification as filed for detailed description of substitutions and preferred embodiments
KPKTRKKRPQRADSDCFS

SEQ ID NO: 4094 - protein, 18 aa, Artificial Sequence
  Description of Artificial Sequence: Synthetic peptide
  N-term H or Acetyl
  MOD_RES (14)..(14): Ser or Phospho-Ser
  MOD_RES (16)..(16): Modified Cys
  See specification as filed for detailed description of substitutions and preferred embodiments
KPKTRKKRPQRADSNCFA

SEQ ID NO: 4095 - protein, 18 aa, Artificial Sequence
  Description of Artificial Sequence: Synthetic peptide
  N-term H or Acetyl
  MOD_RES (14)..(14): Ser or Phospho-Ser
  MOD_RES (16)..(16): Modified Cys
  See specification as filed for detailed description of substitutions and preferred embodiments
KPKTRKKRPQRADSNCFS

SEQ ID NO: 4096 - protein, 18 aa, Artificial Sequence
  Description of Artificial Sequence: Synthetic peptide
  N-term H or Acetyl
  MOD_RES (16)..(16): Modified Cys
  MOD_RES (18)..(18): Ser or Phospho-Ser
  See specification as filed for detailed description of substitutions and preferred embodiments
KPKTRKKRPQRADSDCFS

SEQ ID NO: 4097 - protein, 18 aa, Artificial Sequence
  Description of Artificial Sequence: Synthetic peptide
  N-term H or Acetyl
  MOD_RES (16)..(16): Modified Cys
  MOD_RES (18)..(18): Ser or Phospho-Ser
  See specification as filed for detailed description of substitutions and preferred embodiments
KPKTRKKRPQRADSNCFS

SEQ ID NO: 4098 - protein, 18 aa, Artificial Sequence
  Description of Artificial Sequence: Synthetic peptide
  N-term H or Acetyl
  MOD_RES (14)..(14): Ser or Phospho-Ser
  MOD_RES (16)..(16): Modified Cys
  See specification as filed for detailed description of substitutions and preferred embodiments
KPKTRKKRPQRAESDCFA

SEQ ID NO: 4099 - protein, 18 aa, Artificial Sequence
  Description of Artificial Sequence: Synthetic peptide
  N-term H or Acetyl
  MOD_RES (14)..(14): Ser or Phospho-Ser
  MOD_RES (16)..(16): Modified Cys
  See specification as filed for detailed description of substitutions and preferred embodiments
KPKTRKKRPQRAESDCFS

SEQ ID NO: 4100 - protein, 18 aa, Artificial Sequence
  Description of Artificial Sequence: Synthetic peptide
  N-term H or Acetyl
  MOD_RES (14)..(14): Ser or Phospho-Ser
  MOD_RES (16)..(16): Modified Cys
  See specification as filed for detailed description of substitutions and preferred embodiments
KPKTRKKRPQRAESNCFA

SEQ ID NO: 4101 - protein, 18 aa, Artificial Sequence
  Description of Artificial Sequence: Synthetic peptide
  N-term H or Acetyl
  MOD_RES (14)..(14): Ser or Phospho-Ser
  MOD_RES (16)..(16): Modified Cys
  See specification as filed for detailed description of substitutions and preferred embodiments
KPKTRKKRPQRAESNCFS

SEQ ID NO: 4102 - protein, 18 aa, Artificial Sequence
  Description of Artificial Sequence: Synthetic peptide
  N-term H or Acetyl
  MOD_RES (16)..(16): Modified Cys
  MOD_RES (18)..(18): Ser or Phospho-Ser
  See specification as filed for detailed description of substitutions and preferred embodiments
KPKTRKKRPQRAESDCFS

SEQ ID NO: 4103 - protein, 18 aa, Artificial Sequence
  Description of Artificial Sequence: Synthetic peptide
  N-term H or Acetyl
  MOD_RES (16)..(16): Modified Cys
  MOD_RES (18)..(18): Ser or Phospho-Ser
  See specification as filed for detailed description of substitutions and preferred embodiments
KPKTRKKRPQRAESNCFS

SEQ ID NO: 4104 - protein, 18 aa, Artificial Sequence
  Description of Artificial Sequence: Synthetic peptide
  N-term H or Acetyl
  MOD_RES (14)..(14): Ser or Phospho-Ser
  MOD_RES (16)..(16): Modified Cys
  See specification as filed for detailed description of substitutions and preferred embodiments
KPKTRKKRPQRAHSDCFA

SEQ ID NO: 4105 - protein, 18 aa, Artificial Sequence
  Description of Artificial Sequence: Synthetic peptide
  N-term H or Acetyl
  MOD_RES (14)..(14): Ser or Phospho-Ser
  MOD_RES (16)..(16): Modified Cys
  See specification as filed for detailed description of substitutions and preferred embodiments
KPKTRKKRPQRAHSDCFS

SEQ ID NO: 4106 - protein, 18 aa, Artificial Sequence
  Description of Artificial Sequence: Synthetic peptide
  N-term H or Acetyl
  MOD_RES (14)..(14): Ser or Phospho-Ser
  MOD_RES (16)..(16): Modified Cys
  See specification as filed for detailed description of substitutions and preferred embodiments
KPKTRKKRPQRAHSNCFA

SEQ ID NO: 4107 - protein, 18 aa, Artificial Sequence
  Description of Artificial Sequence: Synthetic peptide
  N-term H or Acetyl
  MOD_RES (14)..(14): Ser or Phospho-Ser
  MOD_RES (16)..(16): Modified Cys
  See specification as filed for detailed description of substitutions and preferred embodiments
KPKTRKKRPQRAHSNCFS

SEQ ID NO: 4108 - protein, 18 aa, Artificial Sequence
  Description of Artificial Sequence: Synthetic peptide
  N-term H or Acetyl
  MOD_RES (16)..(16): Modified Cys
  MOD_RES (18)..(18): Ser or Phospho-Ser
  See specification as filed for detailed description of substitutions and preferred embodiments
KPKTRKKRPQRAHSDCFS

SEQ ID NO: 4109 - protein, 18 aa, Artificial Sequence
  Description of Artificial Sequence: Synthetic peptide
  N-term H or Acetyl
  MOD_RES (16)..(16): Modified Cys
  MOD_RES (18)..(18): Ser or Phospho-Ser
  See specification as filed for detailed description of substitutions and preferred embodiments
KPKTRKKRPQRAHSNCFS

SEQ ID NO: 4110 - protein, 18 aa, Artificial Sequence
  Description of Artificial Sequence: Synthetic peptide
  N-term H or Acetyl
  MOD_RES (14)..(14): Ser or Phospho-Ser
  MOD_RES (16)..(16): Modified Cys
  See specification as filed for detailed description of substitutions and preferred embodiments
KPKTRKKRPQRATSDCFA

SEQ ID NO: 4111 - protein, 18 aa, Artificial Sequence
  Description of Artificial Sequence: Synthetic peptide
  N-term H or Acetyl
  MOD_RES (14)..(14): Ser or Phospho-Ser
  MOD_RES (16)..(16): Modified Cys
  See specification as filed for detailed description of substitutions and preferred embodiments
KPKTRKKRPQRATSDCFS

SEQ ID NO: 4112 - protein, 18 aa, Artificial Sequence
  Description of Artificial Sequence: Synthetic peptide
  N-term H or Acetyl
  MOD_RES (14)..(14): Ser or Phospho-Ser
  MOD_RES (16)..(16): Modified Cys
  See specification as filed for detailed description of substitutions and preferred embodiments
KPKTRKKRPQRATSNCFA

SEQ ID NO: 4113 - protein, 18 aa, Artificial Sequence
  Description of Artificial Sequence: Synthetic peptide
  N-term H or Acetyl
  MOD_RES (14)..(14): Ser or Phospho-Ser
  MOD_RES (16)..(16): Modified Cys
  See specification as filed for detailed description of substitutions and preferred embodiments
KPKTRKKRPQRATSNCFS

SEQ ID NO: 4114 - protein, 18 aa, Artificial Sequence
  Description of Artificial Sequence: Synthetic peptide
  N-term H or Acetyl
  MOD_RES (16)..(16): Modified Cys
  MOD_RES (18)..(18): Ser or Phospho-Ser
  See specification as filed for detailed description of substitutions and preferred embodiments
KPKTRKKRPQRATSDCFS

SEQ ID NO: 4115 - protein, 18 aa, Artificial Sequence
  Description of Artificial Sequence: Synthetic peptide
  N-term H or Acetyl
  MOD_RES (16)..(16): Modified Cys
  MOD_RES (18)..(18): Ser or Phospho-Ser
  See specification as filed for detailed description of substitutions and preferred embodiments
KPKTRKKRPQRATSNCFS

SEQ ID NO: 4116 - protein, 18 aa, Artificial Sequence
  Description of Artificial Sequence: Synthetic peptide
  N-term H or Acetyl
  MOD_RES (14)..(14): Ser or Phospho-Ser
  MOD_RES (16)..(16): Modified Cys
  See specification as filed for detailed description of substitutions and preferred embodiments
KPKTTKKRPQRADSDCFA

SEQ ID NO: 4117 - protein, 18 aa, Artificial Sequence
  Description of Artificial Sequence: Synthetic peptide
  N-term H or Acetyl
  MOD_RES (14)..(14): Ser or Phospho-Ser
  MOD_RES (16)..(16): Modified Cys
  See specification as filed for detailed description of substitutions and preferred embodiments
KPKTTKKRPQRADSDCFS

SEQ ID NO: 4118 - protein, 18 aa, Artificial Sequence
  Description of Artificial Sequence: Synthetic peptide
  N-term H or Acetyl
  MOD_RES (14)..(14): Ser or Phospho-Ser
  MOD_RES (16)..(16): Modified Cys
  See specification as filed for detailed description of substitutions and preferred embodiments
KPKTTKKRPQRADSNCFA

SEQ ID NO: 4119 - protein, 18 aa, Artificial Sequence
  Description of Artificial Sequence: Synthetic peptide
  N-term H or Acetyl
  MOD_RES (14)..(14): Ser or Phospho-Ser
  MOD_RES (16)..(16): Modified Cys
  See specification as filed for detailed description of substitutions and preferred embodiments
KPKTTKKRPQRADSNCFS

SEQ ID NO: 4120 - protein, 18 aa, Artificial Sequence
  Description of Artificial Sequence: Synthetic peptide
  N-term H or Acetyl
  MOD_RES (16)..(16): Modified Cys
  MOD_RES (18)..(18): Ser or Phospho-Ser
  See specification as filed for detailed description of substitutions and preferred embodiments
KPKTTKKRPQRADSDCFS

SEQ ID NO: 4121 - protein, 18 aa, Artificial Sequence
  Description of Artificial Sequence: Synthetic peptide
  N-term H or Acetyl
  MOD_RES (16)..(16): Modified Cys
  MOD_RES (18)..(18): Ser or Phospho-Ser
  See specification as filed for detailed description of substitutions and preferred embodiments
KPKTTKKRPQRADSNCFS

SEQ ID NO: 4122 - protein, 18 aa, Artificial Sequence
  Description of Artificial Sequence: Synthetic peptide
  N-term H or Acetyl
  MOD_RES (14)..(14): Ser or Phospho-Ser
  MOD_RES (16)..(16): Modified Cys
  See specification as filed for detailed description of substitutions and preferred embodiments
KPKTTKKRPQRAESDCFA

SEQ ID NO: 4123 - protein, 18 aa, Artificial Sequence
  Description of Artificial Sequence: Synthetic peptide
  N-term H or Acetyl
  MOD_RES (14)..(14): Ser or Phospho-Ser
  MOD_RES (16)..(16): Modified Cys
  See specification as filed for detailed description of substitutions and preferred embodiments
KPKTTKKRPQRAESDCFS

SEQ ID NO: 4124 - protein, 18 aa, Artificial Sequence
  Description of Artificial Sequence: Synthetic peptide
  N-term H or Acetyl
  MOD_RES (14)..(14): Ser or Phospho-Ser
  MOD_RES (16)..(16): Modified Cys
  See specification as filed for detailed description of substitutions and preferred embodiments
KPKTTKKRPQRAESNCFA

SEQ ID NO: 4125 - protein, 18 aa, Artificial Sequence
  Description of Artificial Sequence: Synthetic peptide
  N-term H or Acetyl
  MOD_RES (14)..(14): Ser or Phospho-Ser
  MOD_RES (16)..(16): Modified Cys
  See specification as filed for detailed description of substitutions and preferred embodiments
KPKTTKKRPQRAESNCFS

SEQ ID NO: 4126 - protein, 18 aa, Artificial Sequence
  Description of Artificial Sequence: Synthetic peptide
  N-term H or Acetyl
  MOD_RES (16)..(16): Modified Cys
  MOD_RES (18)..(18): Ser or Phospho-Ser
  See specification as filed for detailed description of substitutions and preferred embodiments
KPKTTKKRPQRAESDCFS

SEQ ID NO: 4127 - protein, 18 aa, Artificial Sequence
  Description of Artificial Sequence: Synthetic peptide
  N-term H or Acetyl
  MOD_RES (16)..(16): Modified Cys
  MOD_RES (18)..(18): Ser or Phospho-Ser
  See specification as filed for detailed description of substitutions and preferred embodiments
KPKTTKKRPQRAESNCFS

SEQ ID NO: 4128 - protein, 18 aa, Artificial Sequence
  Description of Artificial Sequence: Synthetic peptide
  N-term H or Acetyl
  MOD_RES (14)..(14): Ser or Phospho-Ser
  MOD_RES (16)..(16): Modified Cys
  See specification as filed for detailed description of substitutions and preferred embodiments
KPKTTKKRPQRAHSDCFA

SEQ ID NO: 4129 - protein, 18 aa, Artificial Sequence
  Description of Artificial Sequence: Synthetic peptide
  N-term H or Acetyl
  MOD_RES (14)..(14): Ser or Phospho-Ser
  MOD_RES (16)..(16): Modified Cys
  See specification as filed for detailed description of substitutions and preferred embodiments
KPKTTKKRPQRAHSDCFS

SEQ ID NO: 4130 - protein, 18 aa, Artificial Sequence
  Description of Artificial Sequence: Synthetic peptide
  N-term H or Acetyl
  MOD_RES (14)..(14): Ser or Phospho-Ser
  MOD_RES (16)..(16): Modified Cys
  See specification as filed for detailed description of substitutions and preferred embodiments
KPKTTKKRPQRAHSNCFA

SEQ ID NO: 4131 - protein, 18 aa, Artificial Sequence
  Description of Artificial Sequence: Synthetic peptide
  N-term H or Acetyl
  MOD_RES (14)..(14): Ser or Phospho-Ser
  MOD_RES (16)..(16): Modified Cys
  See specification as filed for detailed description of substitutions and preferred embodiments
KPKTTKKRPQRAHSNCFS

SEQ ID NO: 4132 - protein, 18 aa, Artificial Sequence
  Description of Artificial Sequence: Synthetic peptide
  N-term H or Acetyl
  MOD_RES (16)..(16): Modified Cys
  MOD_RES (18)..(18): Ser or Phospho-Ser
  See specification as filed for detailed description of substitutions and preferred embodiments
KPKTTKKRPQRAHSDCFS

SEQ ID NO: 4133 - protein, 18 aa, Artificial Sequence
  Description of Artificial Sequence: Synthetic peptide
  N-term H or Acetyl
  MOD_RES (16)..(16): Modified Cys
  MOD_RES (18)..(18): Ser or Phospho-Ser
  See specification as filed for detailed description of substitutions and preferred embodiments
KPKTTKKRPQRAHSNCFS

SEQ ID NO: 4134 - protein, 18 aa, Artificial Sequence
  Description of Artificial Sequence: Synthetic peptide
  N-term H or Acetyl
  MOD_RES (14)..(14): Ser or Phospho-Ser
  MOD_RES (16)..(16): Modified Cys
  See specification as filed for detailed description of substitutions and preferred embodiments
KPKTTKKRPQRATSDCFA

SEQ ID NO: 4135 - protein, 18 aa, Artificial Sequence
  Description of Artificial Sequence: Synthetic peptide
  N-term H or Acetyl
  MOD_RES (14)..(14): Ser or Phospho-Ser
  MOD_RES (16)..(16): Modified Cys
  See specification as filed for detailed description of substitutions and preferred embodiments
KPKTTKKRPQRATSDCFS

SEQ ID NO: 4136 - protein, 18 aa, Artificial Sequence
  Description of Artificial Sequence: Synthetic peptide
  N-term H or Acetyl
  MOD_RES (14)..(14): Ser or Phospho-Ser
  MOD_RES (16)..(16): Modified Cys
  See specification as filed for detailed description of substitutions and preferred embodiments
KPKTTKKRPQRATSNCFA

SEQ ID NO: 4137 - protein, 18 aa, Artificial Sequence
  Description of Artificial Sequence: Synthetic peptide
  N-term H or Acetyl
  MOD_RES (14)..(14): Ser or Phospho-Ser
  MOD_RES (16)..(16): Modified Cys
  See specification as filed for detailed description of substitutions and preferred embodiments
KPKTTKKRPQRATSNCFS

SEQ ID NO: 4138 - protein, 18 aa, Artificial Sequence
  Description of Artificial Sequence: Synthetic peptide
  N-term H or Acetyl
  MOD_RES (16)..(16): Modified Cys
  MOD_RES (18)..(18): Ser or Phospho-Ser
  See specification as filed for detailed description of substitutions and preferred embodiments
KPKTTKKRPQRATSDCFS

SEQ ID NO: 4139 - protein, 18 aa, Artificial Sequence
  Description of Artificial Sequence: Synthetic peptide
  N-term H or Acetyl
  MOD_RES (16)..(16): Modified Cys
  MOD_RES (18)..(18): Ser or Phospho-Ser
  See specification as filed for detailed description of substitutions and preferred embodiments
KPKTTKKRPQRATSNCFS

SEQ ID NO: 4140 - protein, 18 aa, Artificial Sequence
  Description of Artificial Sequence: Synthetic peptide
  N-term H or Acetyl
  MOD_RES (14)..(14): Ser or Phospho-Ser
  MOD_RES (16)..(16): Modified Cys
  See specification as filed for detailed description of substitutions and preferred embodiments
KPKTVKKRPQRADSDCFA

SEQ ID NO: 4141 - protein, 18 aa, Artificial Sequence
  Description of Artificial Sequence: Synthetic peptide
  N-term H or Acetyl
  MOD_RES (14)..(14): Ser or Phospho-Ser
  MOD_RES (16)..(16): Modified Cys
  See specification as filed for detailed description of substitutions and preferred embodiments
KPKTVKKRPQRADSDCFS

SEQ ID NO: 4142 - protein, 18 aa, Artificial Sequence
  Description of Artificial Sequence: Synthetic peptide
  N-term H or Acetyl
  MOD_RES (14)..(14): Ser or Phospho-Ser
  MOD_RES (16)..(16): Modified Cys
  See specification as filed for detailed description of substitutions and preferred embodiments
KPKTVKKRPQRADSNCFA

SEQ ID NO: 4143 - protein, 18 aa, Artificial Sequence
  Description of Artificial Sequence: Synthetic peptide
  N-term H or Acetyl
  MOD_RES (14)..(14): Ser or Phospho-Ser
  MOD_RES (16)..(16): Modified Cys
  See specification as filed for detailed description of substitutions and preferred embodiments
KPKTVKKRPQRADSNCFS

SEQ ID NO: 4144 - protein, 18 aa, Artificial Sequence
  Description of Artificial Sequence: Synthetic peptide
  N-term H or Acetyl
  MOD_RES (16)..(16): Modified Cys
  MOD_RES (18)..(18): Ser or Phospho-Ser
  See specification as filed for detailed description of substitutions and preferred embodiments
KPKTVKKRPQRADSDCFS

SEQ ID NO: 4145 - protein, 18 aa, Artificial Sequence
  Description of Artificial Sequence: Synthetic peptide
  N-term H or Acetyl
  MOD_RES (16)..(16): Modified Cys
  MOD_RES (18)..(18): Ser or Phospho-Ser
  See specification as filed for detailed description of substitutions and preferred embodiments
KPKTVKKRPQRADSNCFS

SEQ ID NO: 4146 - protein, 18 aa, Artificial Sequence
  Description of Artificial Sequence: Synthetic peptide
  N-term H or Acetyl
  MOD_RES (14)..(14): Ser or Phospho-Ser
  MOD_RES (16)..(16): Modified Cys
  See specification as filed for detailed description of substitutions and preferred embodiments
KPKTVKKRPQRAESDCFA

SEQ ID NO: 4147 - protein, 18 aa, Artificial Sequence
  Description of Artificial Sequence: Synthetic peptide
  N-term H or Acetyl
  MOD_RES (14)..(14): Ser or Phospho-Ser
  MOD_RES (16)..(16): Modified Cys
  See specification as filed for detailed description of substitutions and preferred embodiments
KPKTVKKRPQRAESDCFS

SEQ ID NO: 4148 - protein, 18 aa, Artificial Sequence
  Description of Artificial Sequence: Synthetic peptide
  N-term H or Acetyl
  MOD_RES (14)..(14): Ser or Phospho-Ser
  MOD_RES (16)..(16): Modified Cys
  See specification as filed for detailed description of substitutions and preferred embodiments
KPKTVKKRPQRAESNCFA

SEQ ID NO: 4149 - protein, 18 aa, Artificial Sequence
  Description of Artificial Sequence: Synthetic peptide
  N-term H or Acetyl
  MOD_RES (14)..(14): Ser or Phospho-Ser
  MOD_RES (16)..(16): Modified Cys
  See specification as filed for detailed description of substitutions and preferred embodiments
KPKTVKKRPQRAESNCFS

SEQ ID NO: 4150 - protein, 18 aa, Artificial Sequence
  Description of Artificial Sequence: Synthetic peptide
  N-term H or Acetyl
  MOD_RES (16)..(16): Modified Cys
  MOD_RES (18)..(18): Ser or Phospho-Ser
  See specification as filed for detailed description of substitutions and preferred embodiments
KPKTVKKRPQRAESDCFS

SEQ ID NO: 4151 - protein, 18 aa, Artificial Sequence
  Description of Artificial Sequence: Synthetic peptide
  N-term H or Acetyl
  MOD_RES (16)..(16): Modified Cys
  MOD_RES (18)..(18): Ser or Phospho-Ser
  See specification as filed for detailed description of substitutions and preferred embodiments
KPKTVKKRPQRAESNCFS

SEQ ID NO: 4152 - protein, 18 aa, Artificial Sequence
  Description of Artificial Sequence: Synthetic peptide
  N-term H or Acetyl
  MOD_RES (14)..(14): Ser or Phospho-Ser
  MOD_RES (16)..(16): Modified Cys
  See specification as filed for detailed description of substitutions and preferred embodiments
KPKTVKKRPQRAHSDCFA

SEQ ID NO: 4153 - protein, 18 aa, Artificial Sequence
  Description of Artificial Sequence: Synthetic peptide
  N-term H or Acetyl
  MOD_RES (14)..(14): Ser or Phospho-Ser
  MOD_RES (16)..(16): Modified Cys
  See specification as filed for detailed description of substitutions and preferred embodiments
KPKTVKKRPQRAHSDCFS

SEQ ID NO: 4154 - protein, 18 aa, Artificial Sequence
  Description of Artificial Sequence: Synthetic peptide
  N-term H or Acetyl
  MOD_RES (14)..(14): Ser or Phospho-Ser
  MOD_RES (16)..(16): Modified Cys
  See specification as filed for detailed description of substitutions and preferred embodiments
KPKTVKKRPQRAHSNCFA

SEQ ID NO: 4155 - protein, 18 aa, Artificial Sequence
  Description of Artificial Sequence: Synthetic peptide
  N-term H or Acetyl
  MOD_RES (14)..(14): Ser or Phospho-Ser
  MOD_RES (16)..(16): Modified Cys
  See specification as filed for detailed description of substitutions and preferred embodiments
KPKTVKKRPQRAHSNCFS

SEQ ID NO: 4156 - protein, 18 aa, Artificial Sequence
  Description of Artificial Sequence: Synthetic peptide
  N-term H or Acetyl
  MOD_RES (16)..(16): Modified Cys
  MOD_RES (18)..(18): Ser or Phospho-Ser
  See specification as filed for detailed description of substitutions and preferred embodiments
KPKTVKKRPQRAHSDCFS

SEQ ID NO: 4157 - protein, 18 aa, Artificial Sequence
  Description of Artificial Sequence: Synthetic peptide
  N-term H or Acetyl
  MOD_RES (16)..(16): Modified Cys
  MOD_RES (18)..(18): Ser or Phospho-Ser
  See specification as filed for detailed description of substitutions and preferred embodiments
KPKTVKKRPQRAHSNCFS

SEQ ID NO: 4158 - protein, 18 aa, Artificial Sequence
  Description of Artificial Sequence: Synthetic peptide
  N-term H or Acetyl
  MOD_RES (14)..(14): Ser or Phospho-Ser
  MOD_RES (16)..(16): Modified Cys
  See specification as filed for detailed description of substitutions and preferred embodiments
KPKTVKKRPQRATSDCFA

SEQ ID NO: 4159 - protein, 18 aa, Artificial Sequence
  Description of Artificial Sequence: Synthetic peptide
  N-term H or Acetyl
  MOD_RES (14)..(14): Ser or Phospho-Ser
  MOD_RES (16)..(16): Modified Cys
  See specification as filed for detailed description of substitutions and preferred embodiments
KPKTVKKRPQRATSDCFS

SEQ ID NO: 4160 - protein, 18 aa, Artificial Sequence
  Description of Artificial Sequence: Synthetic peptide
  N-term H or Acetyl
  MOD_RES (14)..(14): Ser or Phospho-Ser
  MOD_RES (16)..(16): Modified Cys
  See specification as filed for detailed description of substitutions and preferred embodiments
KPKTVKKRPQRATSNCFA

SEQ ID NO: 4161 - protein, 18 aa, Artificial Sequence
  Description of Artificial Sequence: Synthetic peptide
  N-term H or Acetyl
  MOD_RES (14)..(14): Ser or Phospho-Ser
  MOD_RES (16)..(16): Modified Cys
  See specification as filed for detailed description of substitutions and preferred embodiments
KPKTVKKRPQRATSNCFS

SEQ ID NO: 4162 - protein, 18 aa, Artificial Sequence
  Description of Artificial Sequence: Synthetic peptide
  N-term H or Acetyl
  MOD_RES (16)..(16): Modified Cys
  MOD_RES (18)..(18): Ser or Phospho-Ser
  See specification as filed for detailed description of substitutions and preferred embodiments
KPKTVKKRPQRATSDCFS

SEQ ID NO: 4163 - protein, 18 aa, Artificial Sequence
  Description of Artificial Sequence: Synthetic peptide
  N-term H or Acetyl
  MOD_RES (16)..(16): Modified Cys
  MOD_RES (18)..(18): Ser or Phospho-Ser
  See specification as filed for detailed description of substitutions and preferred embodiments
KPKTVKKRPQRATSNCFS

SEQ ID NO: 4164 - protein, 15 aa, Artificial Sequence
  Description of Artificial Sequence: Synthetic peptide
  N-term H or Acetyl
  MOD_RES (8)..(8): Thr or Phospho-Thr
  MOD_RES (10)..(10): Modified Cys
  See specification as filed for detailed description of substitutions and preferred embodiments
KPRPQRATSCVFAMF

SEQ ID NO: 4165 - protein, 15 aa, Artificial Sequence
  Description of Artificial Sequence: Synthetic peptide
  N-term H or Acetyl
  MOD_RES (10)..(10): Ser or Phospho-Ser
  MOD_RES (12)..(12): Modified Cys
  See specification as filed for detailed description of substitutions and preferred embodiments
KQREGFGRQSMCEKR

SEQ ID NO: 4166 - protein, 15 aa, Artificial Sequence
  Description of Artificial Sequence: Synthetic peptide
  N-term H or Acetyl
  MOD_RES (8)..(8): Thr or Phospho-Thr
  MOD_RES (10)..(10): Modified Cys
  See specification as filed for detailed description of substitutions and preferred embodiments
KQRPQRATSCVFAMF

SEQ ID NO: 4167 - protein, 14 aa, Artificial Sequence
  Description of Artificial Sequence: Synthetic peptide
  N-term H or Acetyl
  MOD_RES (6)..(6): Modified Cys
  MOD_RES (8)..(8): Thr or Phospho-Thr
  See specification as filed for detailed description of substitutions and preferred embodiments
KRKLPCDTPGQGLT

SEQ ID NO: 4168 - protein, 18 aa, Artificial Sequence
  Description of Artificial Sequence: Synthetic peptide
  N-term H or Acetyl
  MOD_RES (14)..(14): Ser or Phospho-Ser
  MOD_RES (16)..(16): Modified Cys
  See specification as filed for detailed description of substitutions and preferred embodiments
KRKTTKKRPQRATSNCFS

SEQ ID NO: 4169 - protein, 18 aa, Artificial Sequence
  Description of Artificial Sequence: Synthetic peptide
  N-term H or Acetyl
  MOD_RES (16)..(16): Modified Cys
  MOD_RES (18)..(18): Ser or Phospho-Ser
  See specification as filed for detailed description of substitutions and preferred embodiments
KRKTTKKRPQRATSNCFS

SEQ ID NO: 4170 - protein, 10 aa, Artificial Sequence
  Description of Artificial Sequence: Synthetic peptide
  N-term H or Acetyl
  MOD_RES (4)..(4): Modified Cys
  MOD_RES (6)..(6): Ser or Phospho-Ser
  See specification as filed for detailed description of substitutions and preferred embodiments
KRRCASFRRR

SEQ ID NO: 4171 - protein, 15 aa, Artificial Sequence
  Description of Artificial Sequence: Synthetic peptide
  N-term H or Acetyl
  MOD_RES (8)..(8): Thr or Phospho-Thr
  MOD_RES (10)..(10): Modified Cys
  See specification as filed for detailed description of substitutions and preferred embodiments
KRRPQRATSCVFAMF

SEQ ID NO: 4172 - protein, 10 aa, Artificial Sequence
  Description of Artificial Sequence: Synthetic peptide
  N-term H or Acetyl
  MOD_RES (7)..(7): Ser or Phospho-Ser
  MOD_RES (9)..(9): Modified Cys
  See specification as filed for detailed description of substitutions and preferred embodiments
KRRRLASLCG

SEQ ID NO: 4173 - protein, 14 aa, Artificial Sequence
  Description of Artificial Sequence: Synthetic peptide
  N-term H or Acetyl
  MOD_RES (3)..(3): Ser or Phospho-Ser
  MOD_RES (5)..(5): Modified Cys
  See specification as filed for detailed description of substitutions and preferred embodiments
KRSRCSSFPPGTRK

SEQ ID NO: 4174 - protein, 14 aa, Artificial Sequence
  Description of Artificial Sequence: Synthetic peptide
  N-term H or Acetyl
  MOD_RES (5)..(5): Modified Cys
  MOD_RES (7)..(7): Ser or Phospho-Ser
  See specification as filed for detailed description of substitutions and preferred embodiments
KRSRCSSFPPGTRK

SEQ ID NO: 4175 - protein, 17 aa, Artificial Sequence
  Description of Artificial Sequence: Synthetic peptide
  N-term H or Acetyl
  MOD_RES (2)..(2): Ser or Phospho-Ser
  MOD_RES (4)..(4): Modified Cys
  See specification as filed for detailed description of substitutions and preferred embodiments
KSNCESGDSQQPSQPSQ

SEQ ID NO: 4176 - protein, 17 aa, Artificial Sequence
  Description of Artificial Sequence: Synthetic peptide
  N-term H or Acetyl
  MOD_RES (4)..(4): Modified Cys
  MOD_RES (6)..(6): Ser or Phospho-Ser
  See specification as filed for detailed description of substitutions and preferred embodiments
KSNCESGDSQQPSQPSQ

SEQ ID NO: 4177 - protein, 21 aa, Artificial Sequence
  Description of Artificial Sequence: Synthetic peptide
  N-term H or Acetyl
  MOD_RES (9)..(9): Ser or Phospho-Ser
  MOD_RES (11)..(11): Modified Cys
  See specification as filed for detailed description of substitutions and preferred embodiments
KSNEESGDSQCPSQPSQQPSV

SEQ ID NO: 4178 - protein, 21 aa, Artificial Sequence
  Description of Artificial Sequence: Synthetic peptide
  N-term H or Acetyl
  MOD_RES (11)..(11): Modified Cys
  MOD_RES (13)..(13): Ser or Phospho-Ser
  See specification as filed for detailed description of substitutions and preferred embodiments
KSNEESGDSQCPSQPSQQPSV

SEQ ID NO: 4179 - protein, 21 aa, Artificial Sequence
  Description of Artificial Sequence: Synthetic peptide
  N-term H or Acetyl
  MOD_RES (16)..(16): Ser or Phospho-Ser
  MOD_RES (18)..(18): Modified Cys
  See specification as filed for detailed description of substitutions and preferred embodiments
KSNEESGDSQQPSQPSQCPSV

SEQ ID NO: 4180 - protein, 21 aa, Artificial Sequence
  Description of Artificial Sequence: Synthetic peptide
  N-term H or Acetyl
  MOD_RES (18)..(18): Modified Cys
  MOD_RES (20)..(20): Ser or Phospho-Ser
  See specification as filed for detailed description of substitutions and preferred embodiments
KSNEESGDSQQPSQPSQCPSV

SEQ ID NO: 4181 - protein, 16 aa, Artificial Sequence
  Description of Artificial Sequence: Synthetic peptide
  N-term H or Acetyl
  MOD_RES (12)..(12): Ser or Phospho-Ser
  MOD_RES (14)..(14): Modified Cys
  See specification as filed for detailed description of substitutions and preferred embodiments
KTTKKRPQRATSNCFS

SEQ ID NO: 4182 - protein, 16 aa, Artificial Sequence
  Description of Artificial Sequence: Synthetic peptide
  N-term H or Acetyl
  MOD_RES (14)..(14): Modified Cys
  MOD_RES (16)..(16): Ser or Phospho-Ser
  See specification as filed for detailed description of substitutions and preferred embodiments
KTTKKRPQRATSNCFS

SEQ ID NO: 4183 - protein, 18 aa, Artificial Sequence
  Description of Artificial Sequence: Synthetic peptide
  N-term H or Acetyl
  MOD_RES (14)..(14): Ser or Phospho-Ser
  MOD_RES (16)..(16): Modified Cys
  See specification as filed for detailed description of substitutions and preferred embodiments
KVKTTKKRPQRATSNCFS

SEQ ID NO: 4184 - protein, 18 aa, Artificial Sequence
  Description of Artificial Sequence: Synthetic peptide
  N-term H or Acetyl
  MOD_RES (16)..(16): Modified Cys
  MOD_RES (18)..(18): Ser or Phospho-Ser
  See specification as filed for detailed description of substitutions and preferred embodiments
KVKTTKKRPQRATSNCFS

SEQ ID NO: 4185 - protein, 15 aa, Artificial Sequence
  Description of Artificial Sequence: Synthetic peptide
  N-term H or Acetyl
  MOD_RES (8)..(8): Thr or Phospho-Thr
  MOD_RES (10)..(10): Modified Cys
  See specification as filed for detailed description of substitutions and preferred embodiments
KVRPQRATSCVFAMF

SEQ ID NO: 4186 - protein, 20 aa, Artificial Sequence
  Description of Artificial Sequence: Synthetic peptide
  N-term H or Acetyl
  MOD_RES (12)..(12): Ser or Phospho-Ser
  MOD_RES (13)..(13): Leu or Nle (i.e. isomer of Leucine)
  MOD_RES (14)..(14): Modified Cys
  See specification as filed for detailed description of substitutions and preferred embodiments
KVSRSGLYRSPSLCENLNRP

SEQ ID NO: 4187 - protein, 19 aa, Artificial Sequence
  Description of Artificial Sequence: Synthetic peptide
  N-term H or Acetyl
  MOD_RES (12)..(12): Ser or Phospho-Ser
  MOD_RES (13)..(13): Leu or Nle (i.e. isomer of Leucine)
  MOD_RES (14)..(14): Modified Cys
  See specification as filed for detailed description of substitutions and preferred embodiments
KVSRSGLYRSPSLCENLNR

SEQ ID NO: 4188 - protein, 21 aa, Artificial Sequence
  Description of Artificial Sequence: Synthetic peptide
  N-term H or Acetyl
  MOD_RES (12)..(12): Ser or Phospho-Ser
  MOD_RES (14)..(14): Modified Cys
  See specification as filed for detailed description of substitutions and preferred embodiments
KVSRSGLYRSPSMCENLNRPR

SEQ ID NO: 4189 - protein, 20 aa, Artificial Sequence
  Description of Artificial Sequence: Synthetic peptide
  N-term H or Acetyl
  MOD_RES (12)..(12): Ser or Phospho-Ser
  MOD_RES (14)..(14): Modified Cys
  See specification as filed for detailed description of substitutions and preferred embodiments
KVSRSGLYRSPSMCENLNRP

SEQ ID NO: 4190 - protein, 19 aa, Artificial Sequence
  Description of Artificial Sequence: Synthetic peptide
  N-term H or Acetyl
  MOD_RES (12)..(12): Ser or Phospho-Ser
  MOD_RES (14)..(14): Modified Cys
  See specification as filed for detailed description of substitutions and preferred embodiments
KVSRSGLYRSPSMCENLNR

SEQ ID NO: 4191 - protein, 18 aa, Artificial Sequence
  Description of Artificial Sequence: Synthetic peptide
  N-term H or Acetyl
  MOD_RES (14)..(14): Ser or Phospho-Ser
  MOD_RES (16)..(16): Modified Cys
  See specification as filed for detailed description of substitutions and preferred embodiments
KWKTTKKRPQRATSNCFS

SEQ ID NO: 4192 - protein, 18 aa, Artificial Sequence
  Description of Artificial Sequence: Synthetic peptide
  N-term H or Acetyl
  MOD_RES (16)..(16): Modified Cys
  MOD_RES (18)..(18): Ser or Phospho-Ser
  See specification as filed for detailed description of substitutions and preferred embodiments
KWKTTKKRPQRATSNCFS

SEQ ID NO: 4193 - protein, 16 aa, Artificial Sequence
  Description of Artificial Sequence: Synthetic peptide
  N-term H or Acetyl
  MOD_RES (4)..(4): Leu or Nle (i.e. isomer of Leucine)
  MOD_RES (5)..(5): Leu or Nle (i.e. isomer of Leucine)
  MOD_RES (6)..(6): Leu or Nle (i.e. isomer of Leucine)
  MOD_RES (7)..(7): Ser or Phospho-Ser
  MOD_RES (9)..(9): Modified Cys
  See specification as filed for detailed description of substitutions and preferred embodiments
KWRLLLSLCQSRSSKS

SEQ ID NO: 4194 - protein, 16 aa, Artificial Sequence
  Description of Artificial Sequence: Synthetic peptide
  N-term H or Acetyl
  MOD_RES (4)..(4): Leu or Nle (i.e. isomer of Leucine)
  MOD_RES (5)..(5): Leu or Nle (i.e. isomer of Leucine)
  MOD_RES (6)..(6): Leu or Nle (i.e. isomer of Leucine)
  MOD_RES (9)..(9): Modified Cys
  MOD_RES (11)..(11): Ser or Phospho-Ser
  See specification as filed for detailed description of substitutions and preferred embodiments
KWRLLLSLCQSRSSKS

SEQ ID NO: 4195 - protein, 15 aa, Artificial Sequence
  Description of Artificial Sequence: Synthetic peptide
  N-term H or Acetyl
  MOD_RES (4)..(4): Leu or Nle (i.e. isomer of Leucine)
  MOD_RES (5)..(5): Leu or Nle (i.e. isomer of Leucine)
  MOD_RES (6)..(6): Ser or Phospho-Ser
  MOD_RES (8)..(8): Modified Cys
  See specification as filed for detailed description of substitutions and preferred embodiments
KWRLLSLCQSRSSKS

SEQ ID NO: 4196 - protein, 15 aa, Artificial Sequence
  Description of Artificial Sequence: Synthetic peptide
  N-term H or Acetyl
  MOD_RES (4)..(4): Leu or Nle (i.e. isomer of Leucine)
  MOD_RES (5)..(5): Leu or Nle (i.e. isomer of Leucine)
  MOD_RES (8)..(8): Modified Cys
  MOD_RES (10)..(10): Ser or Phospho-Ser
  See specification as filed for detailed description of substitutions and preferred embodiments
KWRLLSLCQSRSSKS

SEQ ID NO: 4197 - protein, 15 aa, Artificial Sequence
  Description of Artificial Sequence: Synthetic peptide
  N-term H or Acetyl
  MOD_RES (4)..(4): Modified Cys
  MOD_RES (5)..(5): Leu or Nle (i.e. isomer of Leucine)
  MOD_RES (6)..(6): Ser or Phospho-Ser
  See specification as filed for detailed description of substitutions and preferred embodiments
KWRCLSLSQSRSSKS

SEQ ID NO: 4198 - protein, 18 aa, Artificial Sequence
  Description of Artificial Sequence: Synthetic peptide
  N-term H or Acetyl
  MOD_RES (4)..(4): Modified Cys
  MOD_RES (6)..(6): Ser or Phospho-Ser
  See specification as filed for detailed description of substitutions and preferred embodiments
KWRCMSLSQSRSSKSAPE

SEQ ID NO: 4199 - protein, 15 aa, Artificial Sequence
  Description of Artificial Sequence: Synthetic peptide
  N-term H or Acetyl
  MOD_RES (4)..(4): Modified Cys
  MOD_RES (6)..(6): Ser or Phospho-Ser
  See specification as filed for detailed description of substitutions and preferred embodiments
KWRCMSLSQSRSSKS

SEQ ID NO: 4200 - protein, 15 aa, Artificial Sequence
  Description of Artificial Sequence: Synthetic peptide
  N-term H or Acetyl
  MOD_RES (6)..(6): Ser or Phospho-Ser
  MOD_RES (8)..(8): Modified Cys
  See specification as filed for detailed description of substitutions and preferred embodiments
KWRMMSLCQSRSSKS

SEQ ID NO: 4201 - protein, 15 aa, Artificial Sequence
  Description of Artificial Sequence: Synthetic peptide
  N-term H or Acetyl
  MOD_RES (8)..(8): Modified Cys
  MOD_RES (10)..(10): Ser or Phospho-Ser
  See specification as filed for detailed description of substitutions and preferred embodiments
KWRMMSLCQSRSSKS

SEQ ID NO: 4202 - protein, 15 aa, Artificial Sequence
  Description of Artificial Sequence: Synthetic peptide
  N-term H or Acetyl
  MOD_RES (8)..(8): Thr or Phospho-Thr
  MOD_RES (10)..(10): Modified Cys
  See specification as filed for detailed description of substitutions and preferred embodiments
KWRPQRATSCVFAMF

SEQ ID NO: 4203 - protein, 14 aa, Artificial Sequence
  Description of Artificial Sequence: Synthetic peptide
  N-term H or Acetyl
  MOD_RES (7)..(7): Ser or Phospho-Ser
  MOD_RES (9)..(9): Modified Cys
  See specification as filed for detailed description of substitutions and preferred embodiments
LAGISRSVCVTVAY

SEQ ID NO: 4204 - protein, 18 aa, Artificial Sequence
  Description of Artificial Sequence: Synthetic peptide
  N-term H or Acetyl
  MOD_RES (14)..(14): Ser or Phospho-Ser
  MOD_RES (16)..(16): Modified Cys
  See specification as filed for detailed description of substitutions and preferred embodiments
LAKTTKKRPQRATSNCFS

SEQ ID NO: 4205 - protein, 18 aa, Artificial Sequence
  Description of Artificial Sequence: Synthetic peptide
  N-term H or Acetyl
  MOD_RES (16)..(16): Modified Cys
  MOD_RES (18)..(18): Ser or Phospho-Ser
  See specification as filed for detailed description of substitutions and preferred embodiments
LAKTTKKRPQRATSNCFS

SEQ ID NO: 4206 - protein, 20 aa, Artificial Sequence
  Description of Artificial Sequence: Synthetic peptide
  N-term H or Acetyl
  MOD_RES (8)..(8): Modified Cys
  MOD_RES (10)..(10): Thr or Phospho-Thr
  See specification as filed for detailed description of substitutions and preferred embodiments
LANPLMACGTLTRRHQNGRF

SEQ ID NO: 4207 - protein, 15 aa, Artificial Sequence
  Description of Artificial Sequence: Synthetic peptide
  N-term H or Acetyl
  MOD_RES (6)..(6): Leu or Nle (i.e. isomer of Leucine)
  MOD_RES (8)..(8): Ser or Phospho-Ser
  MOD_RES (10)..(10): Modified Cys
  See specification as filed for detailed description of substitutions and preferred embodiments
LASFKLWSKCNNEEH

SEQ ID NO: 4208 - protein, 15 aa, Artificial Sequence
  Description of Artificial Sequence: Synthetic peptide
  N-term H or Acetyl
  MOD_RES (6)..(6): Modified Cys
  MOD_RES (8)..(8): Ser or Phospho-Ser
  See specification as filed for detailed description of substitutions and preferred embodiments
LASFKCWSKLNNEEH

SEQ ID NO: 4209 - protein, 10 aa, Artificial Sequence
  Description of Artificial Sequence: Synthetic peptide
  N-term H or Acetyl
  MOD_RES (2)..(2): Modified Cys
  MOD_RES (4)..(4): Ser or Phospho-Ser
  See specification as filed for detailed description of substitutions and preferred embodiments
LCDSLRRKAK

SEQ ID NO: 4210 - protein, 8 aa, Artificial Sequence
  Description of Artificial Sequence: Synthetic peptide
  N-term H or Acetyl
  MOD_RES (2)..(2): Modified Cys
  MOD_RES (4)..(4): Ser or Phospho-Ser
  See specification as filed for detailed description of substitutions and preferred embodiments
LCLSPGPF

SEQ ID NO: 4211 - protein, 15 aa, Artificial Sequence
  Description of Artificial Sequence: Synthetic peptide
  N-term H or Acetyl
  MOD_RES (8)..(8): Ser or Phospho-Ser
  MOD_RES (10)..(10): Modified Cys
  See specification as filed for detailed description of substitutions and preferred embodiments
LGGLRISSDCSSDIE

SEQ ID NO: 4212 - protein, 15 aa, Artificial Sequence
  Description of Artificial Sequence: Synthetic peptide
  N-term H or Acetyl
  MOD_RES (10)..(10): Modified Cys
  MOD_RES (12)..(12): Ser or Phospho-Ser
  See specification as filed for detailed description of substitutions and preferred embodiments
LGGLRISSDCSSDIE

SEQ ID NO: 4213 - protein, 15 aa, Artificial Sequence
  Description of Artificial Sequence: Synthetic peptide
  N-term H or Acetyl
  MOD_RES (10)..(10): Modified Cys
  MOD_RES (12)..(12): Ser or Phospho-Ser
  See specification as filed for detailed description of substitutions and preferred embodiments
LHQEDNDYICASLIK

SEQ ID NO: 4214 - protein, 15 aa, Artificial Sequence
  Description of Artificial Sequence: Synthetic peptide
  N-term H or Acetyl
  MOD_RES (6)..(6): Modified Cys
  MOD_RES (8)..(8): Thr or Phospho-Thr
  See specification as filed for detailed description of substitutions and preferred embodiments
LIDATCDTPGAEDDE

SEQ ID NO: 4215 - protein, 15 aa, Artificial Sequence
  Description of Artificial Sequence: Synthetic peptide
  N-term H or Acetyl
  MOD_RES (8)..(8): Thr or Phospho-Thr
  MOD_RES (10)..(10): Modified Cys
  See specification as filed for detailed description of substitutions and preferred embodiments
LIDATGDTPCAEDDE

SEQ ID NO: 4216 - protein, 15 aa, Artificial Sequence
  Description of Artificial Sequence: Synthetic peptide
  N-term H or Acetyl
  MOD_RES (8)..(8): Thr or Phospho-Thr
  MOD_RES (11)..(11): Modified Cys
  See specification as filed for detailed description of substitutions and preferred embodiments
LIDATGDTPGCEDDE

SEQ ID NO: 4217 - protein, 19 aa, Artificial Sequence
  Description of Artificial Sequence: Synthetic peptide
  N-term H or Acetyl
  MOD_RES (4)..(4): Ser or Phospho-Ser
  MOD_RES (5)..(5): Leu or Nle (i.e. isomer of Leucine)
  MOD_RES (6)..(6): Modified Cys
  See specification as filed for detailed description of substitutions and preferred embodiments
LIDSLCNSFVGTRSYAKKK

SEQ ID NO: 4218 - protein, 19 aa, Artificial Sequence
  Description of Artificial Sequence: Synthetic peptide
  N-term H or Acetyl
  MOD_RES (5)..(5): Leu or Nle (i.e. isomer of Leucine)
  MOD_RES (6)..(6): Modified Cys
  MOD_RES (8)..(8): Ser or Phospho-Ser
  See specification as filed for detailed description of substitutions and preferred embodiments
LIDSLCNSFVGTRSYAKKK

SEQ ID NO: 4219 - protein, 23 aa, Artificial Sequence
  Description of Artificial Sequence: Synthetic peptide
  N-term H or Acetyl
  MOD_RES (13)..(13): Ser or Phospho-Ser
  MOD_RES (15)..(15): Modified Cys
  See specification as filed for detailed description of substitutions and preferred embodiments
LKKERLLDDRHDSGCDSMKDEEY

SEQ ID NO: 4220 - protein, 23 aa, Artificial Sequence
  Description of Artificial Sequence: Synthetic peptide
  N-term H or Acetyl
  MOD_RES (15)..(15): Modified Cys
  MOD_RES (17)..(17): Ser or Phospho-Ser
  See specification as filed for detailed description of substitutions and preferred embodiments
LKKERLLDDRHDSGCDSMKDEEY

SEQ ID NO: 4221 - protein, 23 aa, Artificial Sequence
  Description of Artificial Sequence: Synthetic peptide
  N-term H or Acetyl
  MOD_RES (17)..(17): Ser or Phospho-Ser
  MOD_RES (19)..(19): Modified Cys
  See specification as filed for detailed description of substitutions and preferred embodiments
LKKERLLDDRHDSGLDSMCDEEY

SEQ ID NO: 4222 - protein, 11 aa, Artificial Sequence
  Description of Artificial Sequence: Synthetic peptide
  N-term H or Acetyl
  MOD_RES (4)..(4): Modified Cys
  MOD_RES (6)..(6): Ser or Phospho-Ser
  See specification as filed for detailed description of substitutions and preferred embodiments
LKRCASFKKFA

SEQ ID NO: 4223 - protein, 15 aa, Artificial Sequence
  Description of Artificial Sequence: Synthetic peptide
  N-term H or Acetyl
  MOD_RES (8)..(8): Thr or Phospho-Thr
  MOD_RES (10)..(10): Modified Cys
  See specification as filed for detailed description of substitutions and preferred embodiments
LKRPQRATSCVFAMF

SEQ ID NO: 4224 - protein, 15 aa, Artificial Sequence
  Description of Artificial Sequence: Synthetic peptide
  N-term H or Acetyl
  MOD_RES (6)..(6): Modified Cys
  MOD_RES (8)..(8): Ser or Phospho-Ser
  See specification as filed for detailed description of substitutions and preferred embodiments
LLDDRCDSGLDSMKD

SEQ ID NO: 4225 - protein, 15 aa, Artificial Sequence
  Description of Artificial Sequence: Synthetic peptide
  N-term H or Acetyl
  MOD_RES (8)..(8): Ser or Phospho-Ser
  MOD_RES (10)..(10): Modified Cys
  See specification as filed for detailed description of substitutions and preferred embodiments
LLDDRHDSGCDSMKD

SEQ ID NO: 4226 - protein, 15 aa, Artificial Sequence
  Description of Artificial Sequence: Synthetic peptide
  N-term H or Acetyl
  MOD_RES (10)..(10): Modified Cys
  MOD_RES (12)..(12): Ser or Phospho-Ser
  See specification as filed for detailed description of substitutions and preferred embodiments
LLDDRHDSGCDSMKD

SEQ ID NO: 4227 - protein, 12 aa, Artificial Sequence
  Description of Artificial Sequence: Synthetic peptide
  N-term H or Acetyl
  MOD_RES (5)..(5): Modified Cys
  MOD_RES (7)..(7): Ser or Phospho-Ser
  See specification as filed for detailed description of substitutions and preferred embodiments
LLLRCSSRRIRR

SEQ ID NO: 4228 - protein, 21 aa, Artificial Sequence
  Description of Artificial Sequence: Synthetic peptide
  N-term H or Acetyl
  MOD_RES (7)..(7): Modified Cys
  MOD_RES (9)..(9): Thr or Phospho-Thr
  See specification as filed for detailed description of substitutions and preferred embodiments
LLPWWRCYTWVVERDVNTKQR

SEQ ID NO: 4229 - protein, 15 aa, Artificial Sequence
  Description of Artificial Sequence: Synthetic peptide
  N-term H or Acetyl
  MOD_RES (8)..(8): Thr or Phospho-Thr
  MOD_RES (10)..(10): Modified Cys
  See specification as filed for detailed description of substitutions and preferred embodiments
LLSNASATPCGRRGR

SEQ ID NO: 4230 - protein, 15 aa, Artificial Sequence
  Description of Artificial Sequence: Synthetic peptide
  N-term H or Acetyl
  MOD_RES (10)..(10): Modified Cys
  MOD_RES (12)..(12): Thr or Phospho-Thr
  See specification as filed for detailed description of substitutions and preferred embodiments
LMLRLQDYECKTKKA

SEQ ID NO: 4231 - protein, 13 aa, Artificial Sequence
  Description of Artificial Sequence: Synthetic peptide
  N-term H or Acetyl
  MOD_RES (6)..(6): Ser or Phospho-Ser
  MOD_RES (8)..(8): Modified Cys
  See specification as filed for detailed description of substitutions and preferred embodiments
LPGPPSPCSDAES

SEQ ID NO: 4232 - protein, 15 aa, Artificial Sequence
  Description of Artificial Sequence: Synthetic peptide
  N-term H or Acetyl
  MOD_RES (10)..(10): Ser or Phospho-Ser
  MOD_RES (12)..(12): Modified Cys
  See specification as filed for detailed description of substitutions and preferred embodiments
LQREGFGRQSMCEKR

SEQ ID NO: 4233 - protein, 15 aa, Artificial Sequence
  Description of Artificial Sequence: Synthetic peptide
  N-term H or Acetyl
  MOD_RES (8)..(8): Ser or Phospho-Ser
  MOD_RES (10)..(10): Modified Cys
  See specification as filed for detailed description of substitutions and preferred embodiments
LRELGQGSFCMVYEG

SEQ ID NO: 4234 - protein, 9 aa, Artificial Sequence
  Description of Artificial Sequence: Synthetic peptide
  N-term H or Acetyl
  MOD_RES (5)..(5): Ser or Phospho-Ser
  MOD_RES (7)..(7): Modified Cys
  See specification as filed for detailed description of substitutions and preferred embodiments
LRRASLCAA

SEQ ID NO: 4235 - protein, 10 aa, Artificial Sequence
  Description of Artificial Sequence: Synthetic peptide
  N-term H or Acetyl
  MOD_RES (4)..(4): Modified Cys
  MOD_RES (6)..(6): Ser or Phospho-Ser
  See specification as filed for detailed description of substitutions and preferred embodiments
LRRCASFRRR

SEQ ID NO: 4236 - protein, 15 aa, Artificial Sequence
  Description of Artificial Sequence: Synthetic peptide
  N-term H or Acetyl
  MOD_RES (8)..(8): Ser or Phospho-Ser
  MOD_RES (10)..(10): Modified Cys
  See specification as filed for detailed description of substitutions and preferred embodiments
LSPVAPLSPCRLQGP

SEQ ID NO: 4237 - protein, 20 aa, Artificial Sequence
  Description of Artificial Sequence: Synthetic peptide
  N-term H or Acetyl
  MOD_RES (13)..(13): Modified Cys
  MOD_RES (15)..(15): Ser or Phospho-Ser
  See specification as filed for detailed description of substitutions and preferred embodiments
LSRDLIMKEDYECVSTKPTR

SEQ ID NO: 4238 - protein, 17 aa, Artificial Sequence
  Description of Artificial Sequence: Synthetic peptide
  N-term H or Acetyl
  MOD_RES (13)..(13): Modified Cys
  MOD_RES (15)..(15): Ser or Phospho-Ser
  See specification as filed for detailed description of substitutions and preferred embodiments
LSRDLIMKEDYECVSTK

SEQ ID NO: 4239 - protein, 15 aa, Artificial Sequence
  Description of Artificial Sequence: Synthetic peptide
  N-term H or Acetyl
  MOD_RES (8)..(8): Ser or Phospho-Ser
  MOD_RES (10)..(10): Modified Cys
  See specification as filed for detailed description of substitutions and preferred embodiments
LVEKLPDSPCLAKKA

SEQ ID NO: 4240 - protein, 8 aa, Artificial Sequence
  Description of Artificial Sequence: Synthetic peptide
  N-term H or Acetyl
  MOD_RES (2)..(2): Modified Cys
  MOD_RES (4)..(4): Ser or Phospho-Ser
  See specification as filed for detailed description of substitutions and preferred embodiments
MCLSPGPF

SEQ ID NO: 4241 - protein, 18 aa, Artificial Sequence
  Description of Artificial Sequence: Synthetic peptide
  N-term H or Acetyl
  MOD_RES (14)..(14): Ser or Phospho-Ser
  MOD_RES (16)..(16): Modified Cys
  See specification as filed for detailed description of substitutions and preferred embodiments
NAKTTKKRPQRATSNCFS

SEQ ID NO: 4242 - protein, 18 aa, Artificial Sequence
  Description of Artificial Sequence: Synthetic peptide
  N-term H or Acetyl
  MOD_RES (16)..(16): Modified Cys
  MOD_RES (18)..(18): Ser or Phospho-Ser
  See specification as filed for detailed description of substitutions and preferred embodiments
NAKTTKKRPQRATSNCFS

SEQ ID NO: 4243 - protein, 20 aa, Artificial Sequence
  Description of Artificial Sequence: Synthetic peptide
  N-term H or Acetyl
  MOD_RES (8)..(8): Modified Cys
  MOD_RES (10)..(10): Thr or Phospho-Thr
  See specification as filed for detailed description of substitutions and preferred embodiments
NANPLMACGTLTRRHQNGRF

SEQ ID NO: 4244 - protein, 10 aa, Artificial Sequence
  Description of Artificial Sequence: Synthetic peptide
  N-term H or Acetyl
  MOD_RES (2)..(2): Modified Cys
  MOD_RES (4)..(4): Ser or Phospho-Ser
  See specification as filed for detailed description of substitutions and preferred embodiments
NCDSLRRKAK

SEQ ID NO: 4245 - protein, 8 aa, Artificial Sequence
  Description of Artificial Sequence: Synthetic peptide
  N-term H or Acetyl
  MOD_RES (2)..(2): Modified Cys
  MOD_RES (4)..(4): Ser or Phospho-Ser
  See specification as filed for detailed description of substitutions and preferred embodiments
NCLSPGPF

SEQ ID NO: 4246 - protein, 15 aa, Artificial Sequence
  Description of Artificial Sequence: Synthetic peptide
  N-term H or Acetyl
  MOD_RES (8)..(8): Ser or Phospho-Ser
  MOD_RES (10)..(10): Modified Cys
  See specification as filed for detailed description of substitutions and preferred embodiments
NKEKKAVSPCLLTTT

SEQ ID NO: 4247 - protein, 15 aa, Artificial Sequence
  Description of Artificial Sequence: Synthetic peptide
  N-term H or Acetyl
  MOD_RES (6)..(6): Modified Cys
  MOD_RES (8)..(8): Ser or Phospho-Ser
  See specification as filed for detailed description of substitutions and preferred embodiments
NKEKKCVSPLLLTTT

SEQ ID NO: 4248 - protein, 15 aa, Artificial Sequence
  Description of Artificial Sequence: Synthetic peptide
  N-term H or Acetyl
  MOD_RES (8)..(8): Thr or Phospho-Thr
  MOD_RES (10)..(10): Modified Cys
  See specification as filed for detailed description of substitutions and preferred embodiments
NKRPQRATSCVFAMF

SEQ ID NO: 4249 - protein, 12 aa, Artificial Sequence
  Description of Artificial Sequence: Synthetic peptide
  N-term H or Acetyl
  MOD_RES (5)..(5): Modified Cys
  MOD_RES (7)..(7): Ser or Phospho-Ser
  See specification as filed for detailed description of substitutions and preferred embodiments
NLLRCSSRRIRR

SEQ ID NO: 4250 - protein, 21 aa, Artificial Sequence
  Description of Artificial Sequence: Synthetic peptide
  N-term H or Acetyl
  MOD_RES (7)..(7): Modified Cys
  MOD_RES (9)..(9): Thr or Phospho-Thr
  See specification as filed for detailed description of substitutions and preferred embodiments
NLPWWRCYTWVVERDVNTKQR

SEQ ID NO: 4251 - protein, 15 aa, Artificial Sequence
  Description of Artificial Sequence: Synthetic peptide
  N-term H or Acetyl
  MOD_RES (8)..(8): Ser or Phospho-Ser
  MOD_RES (10)..(10): Modified Cys
  See specification as filed for detailed description of substitutions and preferred embodiments
NPQDSVGSPCSRVGE

SEQ ID NO: 4252 - protein, 15 aa, Artificial Sequence
  Description of Artificial Sequence: Synthetic peptide
  N-term H or Acetyl
  MOD_RES (10)..(10): Ser or Phospho-Ser
  MOD_RES (12)..(12): Modified Cys
  See specification as filed for detailed description of substitutions and preferred embodiments
NQREGFGRQSMCEKR

SEQ ID NO: 4253 - protein, 15 aa, Artificial Sequence
  Description of Artificial Sequence: Synthetic peptide
  N-term H or Acetyl
  MOD_RES (6)..(6): Modified Cys
  MOD_RES (8)..(8): Ser or Phospho-Ser
  See specification as filed for detailed description of substitutions and preferred embodiments
NQRKACRSLAPRFDL

SEQ ID NO: 4254 - protein, 15 aa, Artificial Sequence
  Description of Artificial Sequence: Synthetic peptide
  N-term H or Acetyl
  MOD_RES (8)..(8): Ser or Phospho-Ser
  MOD_RES (10)..(10): Modified Cys
  See specification as filed for detailed description of substitutions and preferred embodiments
NQRKAKRSLCPRFDL

SEQ ID NO: 4255 - protein, 9 aa, Artificial Sequence
  Description of Artificial Sequence: Synthetic peptide
  N-term H or Acetyl
  MOD_RES (3)..(3): Modified Cys
  MOD_RES (5)..(5): Ser or Phospho-Ser
  See specification as filed for detailed description of substitutions and preferred embodiments
NRCLSFAEG

SEQ ID NO: 4256 - protein, 10 aa, Artificial Sequence
  Description of Artificial Sequence: Synthetic peptide
  N-term H or Acetyl
  MOD_RES (3)..(3): Modified Cys
  MOD_RES (5)..(5): Ser or Phospho-Ser
  See specification as filed for detailed description of substitutions and preferred embodiments
NRCLSFAEPG

SEQ ID NO: 4257 - protein, 10 aa, Artificial Sequence
  Description of Artificial Sequence: Synthetic peptide
  N-term H or Acetyl
  MOD_RES (4)..(4): Modified Cys
  MOD_RES (6)..(6): Ser or Phospho-Ser
  See specification as filed for detailed description of substitutions and preferred embodiments
NRRCASFRRR

SEQ ID NO: 4258 - protein, 16 aa, Artificial Sequence
  Description of Artificial Sequence: Synthetic peptide
  N-term H or Acetyl
  MOD_RES (8)..(8): Ser or Phospho-Ser
  MOD_RES (10)..(10): Modified Cys
  See specification as filed for detailed description of substitutions and preferred embodiments
NSKYNAESTCRESQDT

SEQ ID NO: 4259 - protein, 15 aa, Artificial Sequence
  Description of Artificial Sequence: Synthetic peptide
  N-term H or Acetyl
  MOD_RES (6)..(6): Modified Cys
  MOD_RES (8)..(8): Ser or Phospho-Ser
  See specification as filed for detailed description of substitutions and preferred embodiments
NTIDLCMSPRTLDSL

SEQ ID NO: 4260 - protein, 15 aa, Artificial Sequence
  Description of Artificial Sequence: Synthetic peptide
  N-term H or Acetyl
  MOD_RES (8)..(8): Ser or Phospho-Ser
  MOD_RES (10)..(10): Modified Cys
  See specification as filed for detailed description of substitutions and preferred embodiments
NTIDLPMSPCTLDSL

SEQ ID NO: 4261 - protein, 15 aa, Artificial Sequence
  Description of Artificial Sequence: Synthetic peptide
  N-term H or Acetyl
  MOD_RES (6)..(6): Modified Cys
  MOD_RES (8)..(8): Ser or Phospho-Ser
  See specification as filed for detailed description of substitutions and preferred embodiments
NVLAPCPSQAMDDLM

SEQ ID NO: 4262 - protein, 15 aa, Artificial Sequence
  Description of Artificial Sequence: Synthetic peptide
  N-term H or Acetyl
  MOD_RES (8)..(8): Ser or Phospho-Ser
  MOD_RES (10)..(10): Modified Cys
  MOD_RES (14)..(14): Leu or Nle (i.e. isomer of Leucine)
  See specification as filed for detailed description of substitutions and preferred embodiments
NVRVSNGSPCLERLD

SEQ ID NO: 4263 - protein, 15 aa, Artificial Sequence
  Description of Artificial Sequence: Synthetic peptide
  N-term H or Acetyl
  MOD_RES (6)..(6): Modified Cys
  MOD_RES (7)..(7): Leu or Nle (i.e. isomer of Leucine)
  MOD_RES (8)..(8): Ser or Phospho-Ser
  See specification as filed for detailed description of substitutions and preferred embodiments
PAADACLSPEEELDG

SEQ ID NO: 4264 - protein, 15 aa, Artificial Sequence
  Description of Artificial Sequence: Synthetic peptide
  N-term H or Acetyl
  MOD_RES (7)..(7): Leu or Nle (i.e. isomer of Leucine)
  MOD_RES (8)..(8): Ser or Phospho-Ser
  MOD_RES (10)..(10): Modified Cys
  See specification as filed for detailed description of substitutions and preferred embodiments
PAADAILSPCEELDG

SEQ ID NO: 4265 - protein, 18 aa, Artificial Sequence
  Description of Artificial Sequence: Synthetic peptide
  N-term H or Acetyl
  MOD_RES (14)..(14): Ser or Phospho-Ser
  MOD_RES (16)..(16): Modified Cys
  See specification as filed for detailed description of substitutions and preferred embodiments
PAKTTKKRPQRATSNCFS

SEQ ID NO: 4266 - protein, 18 aa, Artificial Sequence
  Description of Artificial Sequence: Synthetic peptide
  N-term H or Acetyl
  MOD_RES (16)..(16): Modified Cys
  MOD_RES (18)..(18): Ser or Phospho-Ser
  See specification as filed for detailed description of substitutions and preferred embodiments
PAKTTKKRPQRATSNCFS

SEQ ID NO: 4267 - protein, 20 aa, Artificial Sequence
  Description of Artificial Sequence: Synthetic peptide
  N-term H or Acetyl
  MOD_RES (8)..(8): Modified Cys
  MOD_RES (10)..(10): Thr or Phospho-Thr
  See specification as filed for detailed description of substitutions and preferred embodiments
PANPLMACGTLTRRHQNGRF

SEQ ID NO: 4268 - protein, 10 aa, Artificial Sequence
  Description of Artificial Sequence: Synthetic peptide
  N-term H or Acetyl
  MOD_RES (2)..(2): Modified Cys
  MOD_RES (4)..(4): Ser or Phospho-Ser
  See specification as filed for detailed description of substitutions and preferred embodiments
PCDSLRRKAK

SEQ ID NO: 4269 - protein, 14 aa, Artificial Sequence
  Description of Artificial Sequence: Synthetic peptide
  N-term H or Acetyl
  MOD_RES (2)..(2): Modified Cys
  MOD_RES (4)..(4): Ser or Phospho-Ser
  See specification as filed for detailed description of substitutions and preferred embodiments
PCESQEAFADLWKK

SEQ ID NO: 4270 - protein, 8 aa, Artificial Sequence
  Description of Artificial Sequence: Synthetic peptide
  N-term H or Acetyl
  MOD_RES (2)..(2): Modified Cys
  MOD_RES (4)..(4): Ser or Phospho-Ser
  See specification as filed for detailed description of substitutions and preferred embodiments
PCLSPGPF

SEQ ID NO: 4271 - protein, 15 aa, Artificial Sequence
  Description of Artificial Sequence: Synthetic peptide
  N-term H or Acetyl
  MOD_RES (4)..(4): Ser or Phospho-Ser
  MOD_RES (6)..(6): Modified Cys
  See specification as filed for detailed description of substitutions and preferred embodiments
PDTSYCLTPHTEEKY

SEQ ID NO: 4272 - protein, 15 aa, Artificial Sequence
  Description of Artificial Sequence: Synthetic peptide
  N-term H or Acetyl
  MOD_RES (6)..(6): Modified Cys
  MOD_RES (8)..(8): Thr or Phospho-Thr
  See specification as filed for detailed description of substitutions and preferred embodiments
PDTSYCLTPHTEEKY

SEQ ID NO: 4273 - protein, 15 aa, Artificial Sequence
  Description of Artificial Sequence: Synthetic peptide
  N-term H or Acetyl
  MOD_RES (8)..(8): Thr or Phospho-Thr
  MOD_RES (10)..(10): Modified Cys
  See specification as filed for detailed description of substitutions and preferred embodiments
PDTSYVLTPCTEEKY

SEQ ID NO: 4274 - protein, 14 aa, Artificial Sequence
  Description of Artificial Sequence: Synthetic peptide
  N-term H or Acetyl
  MOD_RES (5)..(5): Leu or Nle (i.e. isomer of Leucine)
  MOD_RES (7)..(7): Ser or Phospho-Ser
  MOD_RES (9)..(9): Modified Cys
  See specification as filed for detailed description of substitutions and preferred embodiments
PDVELPSPCAPSGD

SEQ ID NO: 4275 - protein, 15 aa, Artificial Sequence
  Description of Artificial Sequence: Synthetic peptide
  N-term H or Acetyl
  MOD_RES (8)..(8): Thr or Phospho-Thr
  MOD_RES (10)..(10): Modified Cys
  See specification as filed for detailed description of substitutions and preferred embodiments
PKRPQRATSCVFAMF

SEQ ID NO: 4276 - protein, 14 aa, Artificial Sequence
  Description of Artificial Sequence: Synthetic peptide
  N-term H or Acetyl
  MOD_RES (8)..(8): Thr or Phospho-Thr
  MOD_RES (10)..(10): Modified Cys
  See specification as filed for detailed description of substitutions and preferred embodiments
PLKTGEQTPCHEHI

SEQ ID NO: 4277 - protein, 12 aa, Artificial Sequence
  Description of Artificial Sequence: Synthetic peptide
  N-term H or Acetyl
  MOD_RES (5)..(5): Modified Cys
  MOD_RES (7)..(7): Ser or Phospho-Ser
  See specification as filed for detailed description of substitutions and preferred embodiments
PLLRCSSRRIRR

SEQ ID NO: 4278 - protein, 21 aa, Artificial Sequence
  Description of Artificial Sequence: Synthetic peptide
  N-term H or Acetyl
  MOD_RES (7)..(7): Modified Cys
  MOD_RES (9)..(9): Thr or Phospho-Thr
  See specification as filed for detailed description of substitutions and preferred embodiments
PLPWWRCYTWVVERDVNTKQR

SEQ ID NO: 4279 - protein, 15 aa, Artificial Sequence
  Description of Artificial Sequence: Synthetic peptide
  N-term H or Acetyl
  MOD_RES (8)..(8): Ser or Phospho-Ser
  MOD_RES (10)..(10): Modified Cys
  See specification as filed for detailed description of substitutions and preferred embodiments
PLQRQPSSPCPTPRN

SEQ ID NO: 4280 - protein, 15 aa, Artificial Sequence
  Description of Artificial Sequence: Synthetic peptide
  N-term H or Acetyl
  MOD_RES (10)..(10): Modified Cys
  MOD_RES (12)..(12): Thr or Phospho-Thr
  See specification as filed for detailed description of substitutions and preferred embodiments
PLQRQPSSPCPTPRN

SEQ ID NO: 4281 - protein, 19 aa, Artificial Sequence
  Description of Artificial Sequence: Synthetic peptide
  N-term H or Acetyl
  MOD_RES (4)..(4): Thr or Phospho-Thr
  MOD_RES (6)..(6): Modified Cys
  See specification as filed for detailed description of substitutions and preferred embodiments
PLSTWCGSPPYAAPEAKKK

SEQ ID NO: 4282 - protein, 19 aa, Artificial Sequence
  Description of Artificial Sequence: Synthetic peptide
  N-term H or Acetyl
  MOD_RES (6)..(6): Modified Cys
  MOD_RES (8)..(8): Ser or Phospho-Ser
  See specification as filed for detailed description of substitutions and preferred embodiments
PLSTWCGSPPYAAPEAKKK

SEQ ID NO: 4283 - protein, 18 aa, Artificial Sequence
  Description of Artificial Sequence: Synthetic peptide
  N-term H or Acetyl
  MOD_RES (6)..(6): Modified Cys
  MOD_RES (8)..(8): Ser or Phospho-Ser
  MOD_RES (14)..(14): Leu or Nle (i.e. isomer of Leucine)
  See specification as filed for detailed description of substitutions and preferred embodiments
PNTEDCESPSVKRLRKKK

SEQ ID NO: 4284 - protein, 15 aa, Artificial Sequence
  Description of Artificial Sequence: Synthetic peptide
  N-term H or Acetyl
  MOD_RES (8)..(8): Ser or Phospho-Ser
  MOD_RES (10)..(10): Modified Cys
  MOD_RES (14)..(14): Leu or Nle (i.e. isomer of Leucine)
  See specification as filed for detailed description of substitutions and preferred embodiments
PNTEDRESPCVKRLR

SEQ ID NO: 4285 - protein, 15 aa, Artificial Sequence
  Description of Artificial Sequence: Synthetic peptide
  N-term H or Acetyl
  MOD_RES (8)..(8): Ser or Phospho-Ser
  MOD_RES (10)..(10): Modified Cys
  See specification as filed for detailed description of substitutions and preferred embodiments
PPYNRAVSLCSPVSV

SEQ ID NO: 4286 - protein, 15 aa, Artificial Sequence
  Description of Artificial Sequence: Synthetic peptide
  N-term H or Acetyl
  MOD_RES (10)..(10): Ser or Phospho-Ser
  MOD_RES (12)..(12): Modified Cys
  See specification as filed for detailed description of substitutions and preferred embodiments
PQREGFGRQSMCEKR

SEQ ID NO: 4287 - protein, 20 aa, Artificial Sequence
  Description of Artificial Sequence: Synthetic peptide
  N-term H or Acetyl
  MOD_RES (3)..(3): Modified Cys
  MOD_RES (5)..(5): Ser or Phospho-Ser
  MOD_RES (13)..(13): Leu or Nle (i.e. isomer of Leucine)
  See specification as filed for detailed description of substitutions and preferred embodiments
PRCKSLVGTPYWLAPELISR

SEQ ID NO: 4288 - protein, 16 aa, Artificial Sequence
  Description of Artificial Sequence: Synthetic peptide
  N-term H or Acetyl
  MOD_RES (3)..(3): Modified Cys
  MOD_RES (5)..(5): Ser or Phospho-Ser
  MOD_RES (13)..(13): Leu or Nle (i.e. isomer of Leucine)
  See specification as filed for detailed description of substitutions and preferred embodiments
PRCKSLVGTPYWLAPE

SEQ ID NO: 4289 - protein, 16 aa, Artificial Sequence
  Description of Artificial Sequence: Synthetic peptide
  N-term H or Acetyl
  MOD_RES (3)..(3): Modified Cys
  MOD_RES (5)..(5): Ser or Phospho-Ser
  See specification as filed for detailed description of substitutions and preferred embodiments
PRCKSLVGTPYWMAPE

SEQ ID NO: 4290 - protein, 13 aa, Artificial Sequence
  Description of Artificial Sequence: Synthetic peptide
  N-term H or Acetyl
  MOD_RES (3)..(3): Modified Cys
  MOD_RES (5)..(5): Ser or Phospho-Ser
  See specification as filed for detailed description of substitutions and preferred embodiments
PRCKSLVGTPYWM

SEQ ID NO: 4291 - protein, 12 aa, Artificial Sequence
  Description of Artificial Sequence: Synthetic peptide
  N-term H or Acetyl
  MOD_RES (3)..(3): Modified Cys
  MOD_RES (5)..(5): Thr or Phospho-Thr
  See specification as filed for detailed description of substitutions and preferred embodiments
PRCKTPEIFRAL

SEQ ID NO: 4292 - protein, 12 aa, Artificial Sequence
  Description of Artificial Sequence: Synthetic peptide
  N-term H or Acetyl
  MOD_RES (5)..(5): Thr or Phospho-Thr
  MOD_RES (7)..(7): Modified Cys
  See specification as filed for detailed description of substitutions and preferred embodiments
PRPKTPCIFRAL

SEQ ID NO: 4293 - protein, 10 aa, Artificial Sequence
  Description of Artificial Sequence: Synthetic peptide
  N-term H or Acetyl
  MOD_RES (4)..(4): Modified Cys
  MOD_RES (6)..(6): Ser or Phospho-Ser
  See specification as filed for detailed description of substitutions and preferred embodiments
PRRCASFRRR

SEQ ID NO: 4294 - protein, 15 aa, Artificial Sequence
  Description of Artificial Sequence: Synthetic peptide
  N-term H or Acetyl
  MOD_RES (7)..(7): Leu or Nle (i.e. isomer of Leucine)
  MOD_RES (8)..(8): Ser or Phospho-Ser
  MOD_RES (10)..(10): Modified Cys
  See specification as filed for detailed description of substitutions and preferred embodiments
PRTSPILSPCTSLAE

SEQ ID NO: 4295 - protein, 15 aa, Artificial Sequence
  Description of Artificial Sequence: Synthetic peptide
  N-term H or Acetyl
  MOD_RES (7)..(7): Leu or Nle (i.e. isomer of Leucine)
  MOD_RES (10)..(10): Modified Cys
  MOD_RES (12)..(12): Ser or Phospho-Ser
  See specification as filed for detailed description of substitutions and preferred embodiments
PRTSPILSPCTSLAE

SEQ ID NO: 4296 - protein, 21 aa, Artificial Sequence
  Description of Artificial Sequence: Synthetic peptide
  N-term H or Acetyl
  MOD_RES (2)..(2): Ser or Phospho-Ser
  MOD_RES (4)..(4): Modified Cys
  See specification as filed for detailed description of substitutions and preferred embodiments
PSYCRSRSRSRSRSRSRSRSN

SEQ ID NO: 4297 - protein, 15 aa, Artificial Sequence
  Description of Artificial Sequence: Synthetic peptide
  N-term H or Acetyl
  MOD_RES (6)..(6): Modified Cys
  MOD_RES (8)..(8): Thr or Phospho-Thr
  See specification as filed for detailed description of substitutions and preferred embodiments
PSRPPCPTPRRPASV

SEQ ID NO: 4298 - protein, 15 aa, Artificial Sequence
  Description of Artificial Sequence: Synthetic peptide
  N-term H or Acetyl
  MOD_RES (6)..(6): Modified Cys
  MOD_RES (8)..(8): Ser or Phospho-Ser
  See specification as filed for detailed description of substitutions and preferred embodiments
PSVEPCLSQETFSDL

SEQ ID NO: 4299 - protein, 15 aa, Artificial Sequence
  Description of Artificial Sequence: Synthetic peptide
  N-term H or Acetyl
  MOD_RES (8)..(8): Ser or Phospho-Ser
  MOD_RES (10)..(10): Modified Cys
  See specification as filed for detailed description of substitutions and preferred embodiments
PSWHLADSPCVNGAT

SEQ ID NO: 4300 - protein, 21 aa, Artificial Sequence
  Description of Artificial Sequence: Synthetic peptide
  N-term H or Acetyl
  MOD_RES (4)..(4): Modified Cys
  MOD_RES (6)..(6): Ser or Phospho-Ser
  See specification as filed for detailed description of substitutions and preferred embodiments
PSYCRSRSRSRSRSRSRSRSN

SEQ ID NO: 4301 - protein, 21 aa, Artificial Sequence
  Description of Artificial Sequence: Synthetic peptide
  N-term H or Acetyl
  MOD_RES (6)..(6): Modified Cys
  MOD_RES (8)..(8): Ser or Phospho-Ser
  See specification as filed for detailed description of substitutions and preferred embodiments
PSYGRCRSRSRSRSRSRSRSN

SEQ ID NO: 4302 - protein, 21 aa, Artificial Sequence
  Description of Artificial Sequence: Synthetic peptide
  N-term H or Acetyl
  MOD_RES (6)..(6): Ser or Phospho-Ser
  MOD_RES (8)..(8): Modified Cys
  See specification as filed for detailed description of substitutions and preferred embodiments
PSYGRSRCRSRSRSRSRSRSN

SEQ ID NO: 4303 - protein, 21 aa, Artificial Sequence
  Description of Artificial Sequence: Synthetic peptide
  N-term H or Acetyl
  MOD_RES (8)..(8): Modified Cys
  MOD_RES (10)..(10): Ser or Phospho-Ser
  See specification as filed for detailed description of substitutions and preferred embodiments
PSYGRSRCRSRSRSRSRSRSN

SEQ ID NO: 4304 - protein, 21 aa, Artificial Sequence
  Description of Artificial Sequence: Synthetic peptide
  N-term H or Acetyl
  MOD_RES (10)..(10): Ser or Phospho-Ser
  MOD_RES (12)..(12): Modified Cys
  See specification as filed for detailed description of substitutions and preferred embodiments
PSYGRSRSRSRCRSRSRSRSN

SEQ ID NO: 4305 - protein, 21 aa, Artificial Sequence
  Description of Artificial Sequence: Synthetic peptide
  N-term H or Acetyl
  MOD_RES (12)..(12): Modified Cys
  MOD_RES (14)..(14): Ser or Phospho-Ser
  See specification as filed for detailed description of substitutions and preferred embodiments
PSYGRSRSRSRCRSRSRSRSN

SEQ ID NO: 4306 - protein, 21 aa, Artificial Sequence
  Description of Artificial Sequence: Synthetic peptide
  N-term H or Acetyl
  MOD_RES (12)..(12): Ser or Phospho-Ser
  MOD_RES (14)..(14): Modified Cys
  See specification as filed for detailed description of substitutions and preferred embodiments
PSYGRSRSRSRSRCRSRSRSN

SEQ ID NO: 4307 - protein, 21 aa, Artificial Sequence
  Description of Artificial Sequence: Synthetic peptide
  N-term H or Acetyl
  MOD_RES (14)..(14): Modified Cys
  MOD_RES (16)..(16): Ser or Phospho-Ser
  See specification as filed for detailed description of substitutions and preferred embodiments
PSYGRSRSRSRSRCRSRSRSN

SEQ ID NO: 4308 - protein, 21 aa, Artificial Sequence
  Description of Artificial Sequence: Synthetic peptide
  N-term H or Acetyl
  MOD_RES (14)..(14): Ser or Phospho-Ser
  MOD_RES (16)..(16): Modified Cys
  See specification as filed for detailed description of substitutions and preferred embodiments
PSYGRSRSRSRSRSRCRSRSN

SEQ ID NO: 4309 - protein, 21 aa, Artificial Sequence
  Description of Artificial Sequence: Synthetic peptide
  N-term H or Acetyl
  MOD_RES (16)..(16): Modified Cys
  MOD_RES (18)..(18): Ser or Phospho-Ser
  See specification as filed for detailed description of substitutions and preferred embodiments
PSYGRSRSRSRSRSRCRSRSN

SEQ ID NO: 4310 - protein, 21 aa, Artificial Sequence
  Description of Artificial Sequence: Synthetic peptide
  N-term H or Acetyl
  MOD_RES (16)..(16): Ser or Phospho-Ser
  MOD_RES (18)..(18): Modified Cys
  See specification as filed for detailed description of substitutions and preferred embodiments
PSYGRSRSRSRSRSRSRCRSN

SEQ ID NO: 4311 - protein, 21 aa, Artificial Sequence
  Description of Artificial Sequence: Synthetic peptide
  N-term H or Acetyl
  MOD_RES (18)..(18): Modified Cys
  MOD_RES (20)..(20): Ser or Phospho-Ser
  See specification as filed for detailed description of substitutions and preferred embodiments
PSYGRSRSRSRSRSRSRCRSN

SEQ ID NO: 4312 - protein, 21 aa, Artificial Sequence
  Description of Artificial Sequence: Synthetic peptide
  N-term H or Acetyl
  MOD_RES (18)..(18): Ser or Phospho-Ser
  MOD_RES (20)..(20): Modified Cys
  See specification as filed for detailed description of substitutions and preferred embodiments
PSYGRSRSRSRSRSRSRSRCN

SEQ ID NO: 4313 - protein, 22 aa, Artificial Sequence
  Description of Artificial Sequence: Synthetic peptide
  N-term H or Acetyl
  MOD_RES (20)..(20): Ser or Phospho-Ser
  MOD_RES (22)..(22): Modified Cys
  See specification as filed for detailed description of substitutions and preferred embodiments
PSYGRSRSRSRSRSRSRSRSNC

SEQ ID NO: 4314 - protein, 15 aa, Artificial Sequence
  Description of Artificial Sequence: Synthetic peptide
  N-term H or Acetyl
  MOD_RES (8)..(8): Ser or Phospho-Ser
  MOD_RES (10)..(10): Modified Cys
  See specification as filed for detailed description of substitutions and preferred embodiments
PTIPGVTSPCSDEPP

SEQ ID NO: 4315 - protein, 15 aa, Artificial Sequence
  Description of Artificial Sequence: Synthetic peptide
  N-term H or Acetyl
  MOD_RES (8)..(8): Ser or Phospho-Ser
  MOD_RES (10)..(10): Modified Cys
  See specification as filed for detailed description of substitutions and preferred embodiments
PTSPRRYSPCAKDLL

SEQ ID NO: 4316 - protein, 10 aa, Artificial Sequence
  Description of Artificial Sequence: Synthetic peptide
  N-term H or Acetyl
  MOD_RES (7)..(7): Modified Cys
  MOD_RES (9)..(9): Ser or Phospho-Ser
  See specification as filed for detailed description of substitutions and preferred embodiments
PVPEYICQSV

SEQ ID NO: 4317 - protein, 15 aa, Artificial Sequence
  Description of Artificial Sequence: Synthetic peptide
  N-term H or Acetyl
  MOD_RES (4)..(4): Ser or Phospho-Ser
  MOD_RES (6)..(6): Modified Cys
  See specification as filed for detailed description of substitutions and preferred embodiments
PVVSGCTSPRHLSNV

SEQ ID NO: 4318 - protein, 15 aa, Artificial Sequence
  Description of Artificial Sequence: Synthetic peptide
  N-term H or Acetyl
  MOD_RES (6)..(6): Modified Cys
  MOD_RES (8)..(8): Ser or Phospho-Ser
  See specification as filed for detailed description of substitutions and preferred embodiments
PVVSGCTSPRHLSNV

SEQ ID NO: 4319 - protein, 15 aa, Artificial Sequence
  Description of Artificial Sequence: Synthetic peptide
  N-term H or Acetyl
  MOD_RES (8)..(8): Ser or Phospho-Ser
  MOD_RES (10)..(10): Modified Cys
  See specification as filed for detailed description of substitutions and preferred embodiments
PVVSGDTSPCHLSNV

SEQ ID NO: 4320 - protein, 18 aa, Artificial Sequence
  Description of Artificial Sequence: Synthetic peptide
  N-term H or Acetyl
  MOD_RES (2)..(2): Leu or Nle (i.e. isomer of Leucine)
  MOD_RES (6)..(6): Modified Cys
  MOD_RES (8)..(8): Thr or Phospho-Thr
  See specification as filed for detailed description of substitutions and preferred embodiments
QLAGTCITPLKDGFTKKK

SEQ ID NO: 4321 - protein, 15 aa, Artificial Sequence
  Description of Artificial Sequence: Synthetic peptide
  N-term H or Acetyl
  MOD_RES (10)..(10): Modified Cys
  MOD_RES (12)..(12): Ser or Phospho-Ser
  See specification as filed for detailed description of substitutions and preferred embodiments
QALDNPEYHCASNGP

SEQ ID NO: 4322 - protein, 20 aa, Artificial Sequence
  Description of Artificial Sequence: Synthetic peptide
  N-term H or Acetyl
  MOD_RES (8)..(8): Modified Cys
  MOD_RES (10)..(10): Thr or Phospho-Thr
  See specification as filed for detailed description of substitutions and preferred embodiments
QANPLMACGTLTRRHQNGRF

SEQ ID NO: 4323 - protein, 15 aa, Artificial Sequence
  Description of Artificial Sequence: Synthetic peptide
  N-term H or Acetyl
  MOD_RES (6)..(6): Modified Cys
  MOD_RES (8)..(8): Thr or Phospho-Thr
  See specification as filed for detailed description of substitutions and preferred embodiments
QARAKCQTPPVSPAP

SEQ ID NO: 4324 - protein, 15 aa, Artificial Sequence
  Description of Artificial Sequence: Synthetic peptide
  N-term H or Acetyl
  MOD_RES (8)..(8): Thr or Phospho-Thr
  MOD_RES (10)..(10): Modified Cys
  See specification as filed for detailed description of substitutions and preferred embodiments
QARAKTQTPCVSPAP

SEQ ID NO: 4325 - protein, 15 aa, Artificial Sequence
  Description of Artificial Sequence: Synthetic peptide
  N-term H or Acetyl
  MOD_RES (10)..(10): Modified Cys
  MOD_RES (12)..(12): Ser or Phospho-Ser
  See specification as filed for detailed description of substitutions and preferred embodiments
QARAKTQTPCVSPAP

SEQ ID NO: 4326 - protein, 10 aa, Artificial Sequence
  Description of Artificial Sequence: Synthetic peptide
  N-term H or Acetyl
  MOD_RES (2)..(2): Modified Cys
  MOD_RES (4)..(4): Ser or Phospho-Ser
  See specification as filed for detailed description of substitutions and preferred embodiments
QCDSLRRKAK

SEQ ID NO: 4327 - protein, 8 aa, Artificial Sequence
  Description of Artificial Sequence: Synthetic peptide
  N-term H or Acetyl
  MOD_RES (2)..(2): Modified Cys
  MOD_RES (4)..(4): Ser or Phospho-Ser
  See specification as filed for detailed description of substitutions and preferred embodiments
QCLSPGPF

SEQ ID NO: 4328 - protein, 12 aa, Artificial Sequence
  Description of Artificial Sequence: Synthetic peptide
  N-term H or Acetyl
  MOD_RES (3)..(3): Modified Cys
  MOD_RES (5)..(5): Ser or Phospho-Ser
  See specification as filed for detailed description of substitutions and preferred embodiments
QECFSDLWKLLP

SEQ ID NO: 4329 - protein, 12 aa, Artificial Sequence
  Description of Artificial Sequence: Synthetic peptide
  N-term H or Acetyl
  MOD_RES (5)..(5): Ser or Phospho-Ser
  MOD_RES (7)..(7): Modified Cys
  See specification as filed for detailed description of substitutions and preferred embodiments
QETFSDCWKLLP

SEQ ID NO: 4330 - protein, 18 aa, Artificial Sequence
  Description of Artificial Sequence: Synthetic peptide
  N-term H or Acetyl
  MOD_RES (4)..(4): Modified Cys
  MOD_RES (6)..(6): Ser or Phospho-Ser
  See specification as filed for detailed description of substitutions and preferred embodiments
QGVCESPFTRTGEGLDIR

SEQ ID NO: 4331 - protein, 18 aa, Artificial Sequence
  Description of Artificial Sequence: Synthetic peptide
  N-term H or Acetyl
  MOD_RES (6)..(6): Ser or Phospho-Ser
  MOD_RES (8)..(8): Modified Cys
  See specification as filed for detailed description of substitutions and preferred embodiments
QGVPESPCTRTGEGLDIR

SEQ ID NO: 4332 - protein, 18 aa, Artificial Sequence
  Description of Artificial Sequence: Synthetic peptide
  N-term H or Acetyl
  MOD_RES (7)..(7): Modified Cys
  MOD_RES (9)..(9): Thr or Phospho-Thr
  See specification as filed for detailed description of substitutions and preferred embodiments
QGVPESCFTRTGEGLDIR

SEQ ID NO: 4333 - protein, 18 aa, Artificial Sequence
  Description of Artificial Sequence: Synthetic peptide
  N-term H or Acetyl
  MOD_RES (9)..(9): Modified Cys
  MOD_RES (11)..(11): Thr or Phospho-Thr
  See specification as filed for detailed description of substitutions and preferred embodiments
QGVPESPFCRTGEGLDIR

SEQ ID NO: 4334 - protein, 18 aa, Artificial Sequence
  Description of Artificial Sequence: Synthetic peptide
  N-term H or Acetyl
  MOD_RES (9)..(9): Thr or Phospho-Thr
  MOD_RES (11)..(11): Modified Cys
  See specification as filed for detailed description of substitutions and preferred embodiments
QGVPESPFTRCGEGLDIR

SEQ ID NO: 4335 - protein, 18 aa, Artificial Sequence
  Description of Artificial Sequence: Synthetic peptide
  N-term H or Acetyl
  MOD_RES (11)..(11): Thr or Phospho-Thr
  MOD_RES (13)..(13): Modified Cys
  See specification as filed for detailed description of substitutions and preferred embodiments
QGVPESPFTRTGCGLDIR

SEQ ID NO: 4336 - protein, 15 aa, Artificial Sequence
  Description of Artificial Sequence: Synthetic peptide
  N-term H or Acetyl
  MOD_RES (8)..(8): Ser or Phospho-Ser
  MOD_RES (10)..(10): Modified Cys
  See specification as filed for detailed description of substitutions and preferred embodiments
QHSSPAVSDCLPSNS

SEQ ID NO: 4337 - protein, 15 aa, Artificial Sequence
  Description of Artificial Sequence: Synthetic peptide
  N-term H or Acetyl
  MOD_RES (8)..(8): Thr or Phospho-Thr
  MOD_RES (10)..(10): Modified Cys
  See specification as filed for detailed description of substitutions and preferred embodiments
QKRPQRATSCVFAMF

SEQ ID NO: 4338 - protein, 12 aa, Artificial Sequence
  Description of Artificial Sequence: Synthetic peptide
  N-term H or Acetyl
  MOD_RES (5)..(5): Modified Cys
  MOD_RES (7)..(7): Ser or Phospho-Ser
  See specification as filed for detailed description of substitutions and preferred embodiments
QLLRCSSRRIRR

SEQ ID NO: 4339 - protein, 21 aa, Artificial Sequence
  Description of Artificial Sequence: Synthetic peptide
  N-term H or Acetyl
  MOD_RES (7)..(7): Modified Cys
  MOD_RES (9)..(9): Thr or Phospho-Thr
  See specification as filed for detailed description of substitutions and preferred embodiments
QLPWWRCYTWVVERDVNTKQR

SEQ ID NO: 4340 - protein, 15 aa, Artificial Sequence
  Description of Artificial Sequence: Synthetic peptide
  N-term H or Acetyl
  MOD_RES (3)..(3): Ser or Phospho-Ser
  MOD_RES (5)..(5): Modified Cys
  See specification as filed for detailed description of substitutions and preferred embodiments
QLSKCPGSPTSRSSD

SEQ ID NO: 4341 - protein, 15 aa, Artificial Sequence
  Description of Artificial Sequence: Synthetic peptide
  N-term H or Acetyl
  MOD_RES (8)..(8): Ser or Phospho-Ser
  MOD_RES (10)..(10): Modified Cys
  See specification as filed for detailed description of substitutions and preferred embodiments
QMFHLDPSLCHTIFN

SEQ ID NO: 4342 - protein, 15 aa, Artificial Sequence
  Description of Artificial Sequence: Synthetic peptide
  N-term H or Acetyl
  MOD_RES (10)..(10): Modified Cys
  MOD_RES (12)..(12): Thr or Phospho-Thr
  See specification as filed for detailed description of substitutions and preferred embodiments
QMFHLDPSLCHTIFN

SEQ ID NO: 4343 - protein, 8 aa, Artificial Sequence
  Description of Artificial Sequence: Synthetic peptide
  N-term H or Acetyl
  MOD_RES (3)..(3): Modified Cys
  MOD_RES (5)..(5): Ser or Phospho-Ser
  See specification as filed for detailed description of substitutions and preferred embodiments
QPCASPVV

SEQ ID NO: 4344 - protein, 15 aa, Artificial Sequence
  Description of Artificial Sequence: Synthetic peptide
  N-term H or Acetyl
  MOD_RES (10)..(10): Ser or Phospho-Ser
  MOD_RES (12)..(12): Modified Cys
  See specification as filed for detailed description of substitutions and preferred embodiments
QQREGFGRQSMCEKR

SEQ ID NO: 4345 - protein, 18 aa, Artificial Sequence
  Description of Artificial Sequence: Synthetic peptide
  N-term H or Acetyl
  MOD_RES (4)..(4): Modified Cys
  MOD_RES (6)..(6): Ser or Phospho-Ser
  See specification as filed for detailed description of substitutions and preferred embodiments
QRECVSSLDSSSLSLKKK

SEQ ID NO: 4346 - protein, 10 aa, Artificial Sequence
  Description of Artificial Sequence: Synthetic peptide
  N-term H or Acetyl
  MOD_RES (4)..(4): Modified Cys
  MOD_RES (6)..(6): Ser or Phospho-Ser
  See specification as filed for detailed description of substitutions and preferred embodiments
QRRCASFRRR

SEQ ID NO: 4347 - protein, 15 aa, Artificial Sequence
  Description of Artificial Sequence: Synthetic peptide
  N-term H or Acetyl
  MOD_RES (3)..(3): Leu or Nle (i.e. isomer of Leucine)
  MOD_RES (6)..(6): Modified Cys
  MOD_RES (8)..(8): Thr or Phospho-Thr
  See specification as filed for detailed description of substitutions and preferred embodiments
QSLVVCQTPLHTARV

SEQ ID NO: 4348 - protein, 20 aa, Artificial Sequence
  Description of Artificial Sequence: Synthetic peptide
  N-term H or Acetyl
  MOD_RES (8)..(8): Modified Cys
  MOD_RES (10)..(10): Thr or Phospho-Thr
  See specification as filed for detailed description of substitutions and preferred embodiments
QYHFVASCSTIERDRQRPYS

SEQ ID NO: 4349 - protein, 20 aa, Artificial Sequence
  Description of Artificial Sequence: Synthetic peptide
  N-term H or Acetyl
  MOD_RES (10)..(10): Thr or Phospho-Thr
  MOD_RES (12)..(12): Modified Cys
  See specification as filed for detailed description of substitutions and preferred embodiments
QYHFVASSSTICRDRQRPYS

SEQ ID NO: 4350 - protein, 21 aa, Artificial Sequence
  Description of Artificial Sequence: Synthetic peptide
  N-term H or Acetyl
  MOD_RES (2)..(2): Leu or Nle (i.e. isomer of Leucine)
  MOD_RES (7)..(7): Modified Cys
  MOD_RES (9)..(9): Thr or Phospho-Thr
  See specification as filed for detailed description of substitutions and preferred embodiments
RLPWWRCYTWVVERDVNTKQR

SEQ ID NO: 4351 - protein, 10 aa, Artificial Sequence
  Description of Artificial Sequence: Synthetic peptide
  N-term H or Acetyl
  MOD_RES (2)..(2): Leu or Nle (i.e. isomer of Leucine)
  MOD_RES (4)..(4): Modified Cys
  MOD_RES (6)..(6): Ser or Phospho-Ser
  See specification as filed for detailed description of substitutions and preferred embodiments
RLRCASFRRR

SEQ ID NO: 4352 - protein, 15 aa, Artificial Sequence
  Description of Artificial Sequence: Synthetic peptide
  N-term H or Acetyl
  MOD_RES (6)..(6): Modified Cys
  MOD_RES (8)..(8): Ser or Phospho-Ser
  See specification as filed for detailed description of substitutions and preferred embodiments
RADPQCPSRTPVQGP

SEQ ID NO: 4353 - protein, 18 aa, Artificial Sequence
  Description of Artificial Sequence: Synthetic peptide
  N-term H or Acetyl
  MOD_RES (14)..(14): Ser or Phospho-Ser
  MOD_RES (16)..(16): Modified Cys
  See specification as filed for detailed description of substitutions and preferred embodiments
RAKTTKKRPQRATSNCFS

SEQ ID NO: 4354 - protein, 18 aa, Artificial Sequence
  Description of Artificial Sequence: Synthetic peptide
  N-term H or Acetyl
  MOD_RES (16)..(16): Modified Cys
  MOD_RES (18)..(18): Ser or Phospho-Ser
  See specification as filed for detailed description of substitutions and preferred embodiments
RAKTTKKRPQRATSNCFS

SEQ ID NO: 4355 - protein, 20 aa, Artificial Sequence
  Description of Artificial Sequence: Synthetic peptide
  N-term H or Acetyl
  MOD_RES (8)..(8): Modified Cys
  MOD_RES (10)..(10): Thr or Phospho-Thr
  See specification as filed for detailed description of substitutions and preferred embodiments
RANPLMACGTLTRRHQNGRF

SEQ ID NO: 4356 - protein, 21 aa, Artificial Sequence
  Description of Artificial Sequence: Synthetic peptide
  N-term H or Acetyl
  MOD_RES (7)..(7): Modified Cys
  MOD_RES (9)..(9): Thr or Phospho-Thr
  See specification as filed for detailed description of substitutions and preferred embodiments
RAPWWRCYTWVVERDVNTKQR

SEQ ID NO: 4357 - protein, 10 aa, Artificial Sequence
  Description of Artificial Sequence: Synthetic peptide
  N-term H or Acetyl
  MOD_RES (4)..(4): Modified Cys
  MOD_RES (6)..(6): Ser or Phospho-Ser
  See specification as filed for detailed description of substitutions and preferred embodiments
RARCASFRRR

SEQ ID NO: 4358 - protein, 10 aa, Artificial Sequence
  Description of Artificial Sequence: Synthetic peptide
  N-term H or Acetyl
  MOD_RES (4)..(4): Modified Cys
  MOD_RES (6)..(6): Ser or Phospho-Ser
  See specification as filed for detailed description of substitutions and preferred embodiments
RARCLSFAEG

SEQ ID NO: 4359 - protein, 11 aa, Artificial Sequence
  Description of Artificial Sequence: Synthetic peptide
  N-term H or Acetyl
  MOD_RES (4)..(4): Modified Cys
  MOD_RES (6)..(6): Ser or Phospho-Ser
  See specification as filed for detailed description of substitutions and preferred embodiments
RARCLSFAEPG

SEQ ID NO: 4360 - protein, 14 aa, Artificial Sequence
  Description of Artificial Sequence: Synthetic peptide
  N-term H or Acetyl
  MOD_RES (5)..(5): Modified Cys
  MOD_RES (7)..(7): Ser or Phospho-Ser
  See specification as filed for detailed description of substitutions and preferred embodiments
RARRCLSFSGFGSR

SEQ ID NO: 4361 - protein, 8 aa, Artificial Sequence
  Description of Artificial Sequence: Synthetic peptide
  N-term H or Acetyl
  MOD_RES (2)..(2): Modified Cys
  MOD_RES (4)..(4): Ser or Phospho-Ser
  See specification as filed for detailed description of substitutions and preferred embodiments
RCASFRRR

SEQ ID NO: 4362 - protein, 7 aa, Artificial Sequence
  Description of Artificial Sequence: Synthetic peptide
  N-term H or Acetyl
  MOD_RES (2)..(2): Modified Cys
  MOD_RES (4)..(4): Ser or Phospho-Ser
  See specification as filed for detailed description of substitutions and preferred embodiments
RCASFRR

SEQ ID NO: 4363 - protein, 6 aa, Artificial Sequence
  Description of Artificial Sequence: Synthetic peptide
  N-term H or Acetyl
  MOD_RES (2)..(2): Modified Cys
  MOD_RES (4)..(4): Ser or Phospho-Ser
  See specification as filed for detailed description of substitutions and preferred embodiments
RCASFR

SEQ ID NO: 4364 - protein, 10 aa, Artificial Sequence
  Description of Artificial Sequence: Synthetic peptide
  N-term H or Acetyl
  MOD_RES (2)..(2): Modified Cys
  MOD_RES (4)..(4): Ser or Phospho-Ser
  See specification as filed for detailed description of substitutions and preferred embodiments
RCDSLRRKAK

SEQ ID NO: 4365 - protein, 10 aa, Artificial Sequence
  Description of Artificial Sequence: Synthetic peptide
  N-term H or Acetyl
  MOD_RES (2)..(2): Modified Cys
  MOD_RES (4)..(4): Ser or Phospho-Ser
  See specification as filed for detailed description of substitutions and preferred embodiments
RCFSLRRKAK

SEQ ID NO: 4366 - protein, 8 aa, Artificial Sequence
  Description of Artificial Sequence: Synthetic peptide
  N-term H or Acetyl
  MOD_RES (2)..(2): Modified Cys
  MOD_RES (4)..(4): Ser or Phospho-Ser
  See specification as filed for detailed description of substitutions and preferred embodiments
RCLSFAEG

SEQ ID NO: 4367 - protein, 9 aa, Artificial Sequence
  Description of Artificial Sequence: Synthetic peptide
  N-term H or Acetyl
  MOD_RES (2)..(2): Modified Cys
  MOD_RES (4)..(4): Ser or Phospho-Ser
  See specification as filed for detailed description of substitutions and preferred embodiments
RCLSFAEPG

SEQ ID NO: 4368 - protein, 8 aa, Artificial Sequence
  Description of Artificial Sequence: Synthetic peptide
  N-term H or Acetyl
  MOD_RES (2)..(2): Modified Cys
  MOD_RES (4)..(4): Ser or Phospho-Ser
  See specification as filed for detailed description of substitutions and preferred embodiments
RCLSPGPF

SEQ ID NO: 4369 - protein, 21 aa, Artificial Sequence
  Description of Artificial Sequence: Synthetic peptide
  N-term H or Acetyl
  MOD_RES (7)..(7): Modified Cys
  MOD_RES (9)..(9): Thr or Phospho-Thr
  See specification as filed for detailed description of substitutions and preferred embodiments
RDPWWRCYTWVVERDVNTKQR

SEQ ID NO: 4370 - protein, 10 aa, Artificial Sequence
  Description of Artificial Sequence: Synthetic peptide
  N-term H or Acetyl
  MOD_RES (4)..(4): Modified Cys
  MOD_RES (6)..(6): Ser or Phospho-Ser
  See specification as filed for detailed description of substitutions and preferred embodiments
RDRCASFRRR

SEQ ID NO: 4371 - protein, 11 aa, Artificial Sequence
  Description of Artificial Sequence: Synthetic peptide
  N-term H or Acetyl
  MOD_RES (3)..(3): Modified Cys
  MOD_RES (5)..(5): Ser or Phospho-Ser
  MOD_RES (9)..(9): Ser or Phospho-Ser
  See specification as filed for detailed description of substitutions and preferred embodiments
RECLSRRPSYR

SEQ ID NO: 4372 - protein, 21 aa, Artificial Sequence
  Description of Artificial Sequence: Synthetic peptide
  N-term H or Acetyl
  MOD_RES (7)..(7): Modified Cys
  MOD_RES (9)..(9): Thr or Phospho-Thr
  See specification as filed for detailed description of substitutions and preferred embodiments
REPWWRCYTWVVERDVNTKQR

SEQ ID NO: 4373 - protein, 10 aa, Artificial Sequence
  Description of Artificial Sequence: Synthetic peptide
  N-term H or Acetyl
  MOD_RES (4)..(4): Modified Cys
  MOD_RES (6)..(6): Ser or Phospho-Ser
  See specification as filed for detailed description of substitutions and preferred embodiments
RERCASFRRR

SEQ ID NO: 4374 - protein, 17 aa, Artificial Sequence
  Description of Artificial Sequence: Synthetic peptide
  N-term H or Acetyl
  MOD_RES (4)..(4): Ser or Phospho-Ser
  MOD_RES (6)..(6): Modified Cys
  See specification as filed for detailed description of substitutions and preferred embodiments
RFDSRCISGLLTTAKKK

SEQ ID NO: 4375 - protein, 17 aa, Artificial Sequence
  Description of Artificial Sequence: Synthetic peptide
  N-term H or Acetyl
  MOD_RES (6)..(6): Modified Cys
  MOD_RES (8)..(8): Ser or Phospho-Ser
  See specification as filed for detailed description of substitutions and preferred embodiments
RFDSRCISGLLTTAKKK

SEQ ID NO: 4376 - protein, 11 aa, Artificial Sequence
  Description of Artificial Sequence: Synthetic peptide
  N-term H or Acetyl
  MOD_RES (4)..(4): Modified Cys
  MOD_RES (6)..(6): Thr or Phospho-Thr
  See specification as filed for detailed description of substitutions and preferred embodiments
RFICPTALIRF

SEQ ID NO: 4377 - protein, 11 aa, Artificial Sequence
  Description of Artificial Sequence: Synthetic peptide
  N-term H or Acetyl
  MOD_RES (4)..(4): Modified Cys
  MOD_RES (6)..(6): Thr or Phospho-Thr
  See specification as filed for detailed description of substitutions and preferred embodiments
RFICPTNRRRF

SEQ ID NO: 4378 - protein, 11 aa, Artificial Sequence
  Description of Artificial Sequence: Synthetic peptide
  N-term H or Acetyl
  MOD_RES (6)..(6): Thr or Phospho-Thr
  MOD_RES (8)..(8): Modified Cys
  See specification as filed for detailed description of substitutions and preferred embodiments
RFILPTACIRF

SEQ ID NO: 4379 - protein, 11 aa, Artificial Sequence
  Description of Artificial Sequence: Synthetic peptide
  N-term H or Acetyl
  MOD_RES (6)..(6): Thr or Phospho-Thr
  MOD_RES (8)..(8): Modified Cys
  See specification as filed for detailed description of substitutions and preferred embodiments
RFILPTNCRRF

SEQ ID NO: 4380 - protein, 21 aa, Artificial Sequence
  Description of Artificial Sequence: Synthetic peptide
  N-term H or Acetyl
  MOD_RES (7)..(7): Modified Cys
  MOD_RES (9)..(9): Thr or Phospho-Thr
  See specification as filed for detailed description of substitutions and preferred embodiments
RFPWWRCYTWVVERDVNTKQR

SEQ ID NO: 4381 - protein, 10 aa, Artificial Sequence
  Description of Artificial Sequence: Synthetic peptide
  N-term H or Acetyl
  MOD_RES (4)..(4): Modified Cys
  MOD_RES (6)..(6): Ser or Phospho-Ser
  See specification as filed for detailed description of substitutions and preferred embodiments
RFRCASFRRR

SEQ ID NO: 4382 - protein, 15 aa, Artificial Sequence
  Description of Artificial Sequence: Synthetic peptide
  N-term H or Acetyl
  MOD_RES (8)..(8): Ser or Phospho-Ser
  MOD_RES (10)..(10): Modified Cys
  See specification as filed for detailed description of substitutions and preferred embodiments
RGGPEPLSPCPVSPL

SEQ ID NO: 4383 - protein, 21 aa, Artificial Sequence
  Description of Artificial Sequence: Synthetic peptide
  N-term H or Acetyl
  MOD_RES (7)..(7): Modified Cys
  MOD_RES (9)..(9): Thr or Phospho-Thr
  See specification as filed for detailed description of substitutions and preferred embodiments
RGPWWRCYTWVVERDVNTKQR

SEQ ID NO: 4384 - protein, 10 aa, Artificial Sequence
  Description of Artificial Sequence: Synthetic peptide
  N-term H or Acetyl
  MOD_RES (4)..(4): Modified Cys
  MOD_RES (6)..(6): Ser or Phospho-Ser
  See specification as filed for detailed description of substitutions and preferred embodiments
RGRCASFRRR

SEQ ID NO: 4385 - protein, 15 aa, Artificial Sequence
  Description of Artificial Sequence: Synthetic peptide
  N-term H or Acetyl
  MOD_RES (4)..(4): Leu or Nle (i.e. isomer of Leucine)
  MOD_RES (8)..(8): Ser or Phospho-Ser
  MOD_RES (10)..(10): Modified Cys
  See specification as filed for detailed description of substitutions and preferred embodiments
RGSLAAPSLCPSLGP

SEQ ID NO: 4386 - protein, 15 aa, Artificial Sequence
  Description of Artificial Sequence: Synthetic peptide
  N-term H or Acetyl
  MOD_RES (4)..(4): Leu or Nle (i.e. isomer of Leucine)
  MOD_RES (10)..(10): Modified Cys
  MOD_RES (12)..(12): Ser or Phospho-Ser
  See specification as filed for detailed description of substitutions and preferred embodiments
RGSLAAPSLCPSLGP

SEQ ID NO: 4387 - protein, 15 aa, Artificial Sequence
  Description of Artificial Sequence: Synthetic peptide
  N-term H or Acetyl
  MOD_RES (4)..(4): Ser or Phospho-Ser
  MOD_RES (8)..(8): Ser or Phospho-Ser
  MOD_RES (10)..(10): Modified Cys
  See specification as filed for detailed description of substitutions and preferred embodiments
RHDSGLDSMCDEEYE

SEQ ID NO: 4388 - protein, 21 aa, Artificial Sequence
  Description of Artificial Sequence: Synthetic peptide
  N-term H or Acetyl
  MOD_RES (7)..(7): Modified Cys
  MOD_RES (9)..(9): Thr or Phospho-Thr
  See specification as filed for detailed description of substitutions and preferred embodiments
RHPWWRCYTWVVERDVNTKQR

SEQ ID NO: 4389 - protein, 10 aa, Artificial Sequence
  Description of Artificial Sequence: Synthetic peptide
  N-term H or Acetyl
  MOD_RES (4)..(4): Modified Cys
  MOD_RES (6)..(6): Ser or Phospho-Ser
  See specification as filed for detailed description of substitutions and preferred embodiments
RHRCASFRRR

SEQ ID NO: 4390 - protein, 21 aa, Artificial Sequence
  Description of Artificial Sequence: Synthetic peptide
  N-term H or Acetyl
  MOD_RES (7)..(7): Modified Cys
  MOD_RES (9)..(9): Thr or Phospho-Thr
  See specification as filed for detailed description of substitutions and preferred embodiments
RIPWWRCYTWVVERDVNTKQR

SEQ ID NO: 4391 - protein, 10 aa, Artificial Sequence
  Description of Artificial Sequence: Synthetic peptide
  N-term H or Acetyl
  MOD_RES (4)..(4): Modified Cys
  MOD_RES (6)..(6): Ser or Phospho-Ser
  See specification as filed for detailed description of substitutions and preferred embodiments
RIRCASFRRR

SEQ ID NO: 4392 - protein, 16 aa, Artificial Sequence
  Description of Artificial Sequence: Synthetic peptide
  N-term H or Acetyl
  MOD_RES (8)..(8): Modified Cys
  MOD_RES (10)..(10): Thr or Phospho-Thr
  See specification as filed for detailed description of substitutions and preferred embodiments
RKKYKFNCDTERRRFL

SEQ ID NO: 4393 - protein, 21 aa, Artificial Sequence
  Description of Artificial Sequence: Synthetic peptide
  N-term H or Acetyl
  MOD_RES (7)..(7): Modified Cys
  MOD_RES (9)..(9): Thr or Phospho-Thr
  See specification as filed for detailed description of substitutions and preferred embodiments
RKPWWRCYTWVVERDVNTKQR

SEQ ID NO: 4394 - protein, 10 aa, Artificial Sequence
  Description of Artificial Sequence: Synthetic peptide
  N-term H or Acetyl
  MOD_RES (4)..(4): Modified Cys
  MOD_RES (6)..(6): Ser or Phospho-Ser
  See specification as filed for detailed description of substitutions and preferred embodiments
RKRCASFRRR

SEQ ID NO: 4395 - protein, 11 aa, Artificial Sequence
  Description of Artificial Sequence: Synthetic peptide
  N-term H or Acetyl
  MOD_RES (6)..(6): Ser or Phospho-Ser
  MOD_RES (8)..(8): Modified Cys
  See specification as filed for detailed description of substitutions and preferred embodiments
RKRKGSFCYGG

SEQ ID NO: 4396 - protein, 15 aa, Artificial Sequence
  Description of Artificial Sequence: Synthetic peptide
  N-term H or Acetyl
  MOD_RES (8)..(8): Thr or Phospho-Thr
  MOD_RES (10)..(10): Modified Cys
  See specification as filed for detailed description of substitutions and preferred embodiments
RKRPQRATSCVFAMF

SEQ ID NO: 4397 - protein, 21 aa, Artificial Sequence
  Description of Artificial Sequence: Synthetic peptide
  N-term H or Acetyl
  MOD_RES (7)..(7): Modified Cys
  MOD_RES (9)..(9): Thr or Phospho-Thr
  See specification as filed for detailed description of substitutions and preferred embodiments
RLGWWRCFTLRRARQGNTKQR

SEQ ID NO: 4398 - protein, 21 aa, Artificial Sequence
  Description of Artificial Sequence: Synthetic peptide
  N-term H or Acetyl
  MOD_RES (7)..(7): Modified Cys
  MOD_RES (9)..(9): Thr or Phospho-Thr
  See specification as filed for detailed description of substitutions and preferred embodiments
RLGWWRCYTLQRARDGNTKQR

SEQ ID NO: 4399 - protein, 21 aa, Artificial Sequence
  Description of Artificial Sequence: Synthetic peptide
  N-term H or Acetyl
  MOD_RES (7)..(7): Modified Cys
  MOD_RES (9)..(9): Thr or Phospho-Thr
  See specification as filed for detailed description of substitutions and preferred embodiments
RLGWWRCYTLQRARDVNTKQR

SEQ ID NO: 4400 - protein, 21 aa, Artificial Sequence
  Description of Artificial Sequence: Synthetic peptide
  N-term H or Acetyl
  MOD_RES (7)..(7): Modified Cys
  MOD_RES (9)..(9): Thr or Phospho-Thr
  See specification as filed for detailed description of substitutions and preferred embodiments
RLGWWRCYTLQRAREGNTKQR

SEQ ID NO: 4401 - protein, 21 aa, Artificial Sequence
  Description of Artificial Sequence: Synthetic peptide
  N-term H or Acetyl
  MOD_RES (7)..(7): Modified Cys
  MOD_RES (9)..(9): Thr or Phospho-Thr
  See specification as filed for detailed description of substitutions and preferred embodiments
RLGWWRCYTLQRAREVNTKQR

SEQ ID NO: 4402 - protein, 21 aa, Artificial Sequence
  Description of Artificial Sequence: Synthetic peptide
  N-term H or Acetyl
  MOD_RES (7)..(7): Modified Cys
  MOD_RES (9)..(9): Thr or Phospho-Thr
  See specification as filed for detailed description of substitutions and preferred embodiments
RLGWWRCYTLQRARQGNTKQR

SEQ ID NO: 4403 - protein, 21 aa, Artificial Sequence
  Description of Artificial Sequence: Synthetic peptide
  N-term H or Acetyl
  MOD_RES (7)..(7): Modified Cys
  MOD_RES (9)..(9): Thr or Phospho-Thr
  See specification as filed for detailed description of substitutions and preferred embodiments
RLGWWRCYTLQRARQVNTKQR

SEQ ID NO: 4404 - protein, 21 aa, Artificial Sequence
  Description of Artificial Sequence: Synthetic peptide
  N-term H or Acetyl
  MOD_RES (7)..(7): Modified Cys
  MOD_RES (9)..(9): Thr or Phospho-Thr
  See specification as filed for detailed description of substitutions and preferred embodiments
RLGWWRCYTLQRERDGNTKQR

SEQ ID NO: 4405 - protein, 21 aa, Artificial Sequence
  Description of Artificial Sequence: Synthetic peptide
  N-term H or Acetyl
  MOD_RES (7)..(7): Modified Cys
  MOD_RES (9)..(9): Thr or Phospho-Thr
  See specification as filed for detailed description of substitutions and preferred embodiments
RLGWWRCYTLQRERDVNTKQR

SEQ ID NO: 4406 - protein, 21 aa, Artificial Sequence
  Description of Artificial Sequence: Synthetic peptide
  N-term H or Acetyl
  MOD_RES (7)..(7): Modified Cys
  MOD_RES (9)..(9): Thr or Phospho-Thr
  See specification as filed for detailed description of substitutions and preferred embodiments
RLGWWRCYTLQREREGNTKQR

SEQ ID NO: 4407 - protein, 21 aa, Artificial Sequence
  Description of Artificial Sequence: Synthetic peptide
  N-term H or Acetyl
  MOD_RES (7)..(7): Modified Cys
  MOD_RES (9)..(9): Thr or Phospho-Thr
  See specification as filed for detailed description of substitutions and preferred embodiments
RLGWWRCYTLQREREVNTKQR

SEQ ID NO: 4408 - protein, 21 aa, Artificial Sequence
  Description of Artificial Sequence: Synthetic peptide
  N-term H or Acetyl
  MOD_RES (7)..(7): Modified Cys
  MOD_RES (9)..(9): Thr or Phospho-Thr
  See specification as filed for detailed description of substitutions and preferred embodiments
RLGWWRCYTLQRERQGNTKQR

SEQ ID NO: 4409 - protein, 21 aa, Artificial Sequence
  Description of Artificial Sequence: Synthetic peptide
  N-term H or Acetyl
  MOD_RES (7)..(7): Modified Cys
  MOD_RES (9)..(9): Thr or Phospho-Thr
  See specification as filed for detailed description of substitutions and preferred embodiments
RLGWWRCYTLQRERQVNTKQR

SEQ ID NO: 4410 - protein, 21 aa, Artificial Sequence
  Description of Artificial Sequence: Synthetic peptide
  N-term H or Acetyl
  MOD_RES (7)..(7): Modified Cys
  MOD_RES (9)..(9): Thr or Phospho-Thr
  See specification as filed for detailed description of substitutions and preferred embodiments
RLGWWRCYTLQVARDGNTKQR

SEQ ID NO: 4411 - protein, 21 aa, Artificial Sequence
  Description of Artificial Sequence: Synthetic peptide
  N-term H or Acetyl
  MOD_RES (7)..(7): Modified Cys
  MOD_RES (9)..(9): Thr or Phospho-Thr
  See specification as filed for detailed description of substitutions and preferred embodiments
RLGWWRCYTLQVARDVNTKQR

SEQ ID NO: 4412 - protein, 21 aa, Artificial Sequence
  Description of Artificial Sequence: Synthetic peptide
  N-term H or Acetyl
  MOD_RES (7)..(7): Modified Cys
  MOD_RES (9)..(9): Thr or Phospho-Thr
  See specification as filed for detailed description of substitutions and preferred embodiments
RLGWWRCYTLQVAREGNTKQR

SEQ ID NO: 4413 - protein, 21 aa, Artificial Sequence
  Description of Artificial Sequence: Synthetic peptide
  N-term H or Acetyl
  MOD_RES (7)..(7): Modified Cys
  MOD_RES (9)..(9): Thr or Phospho-Thr
  See specification as filed for detailed description of substitutions and preferred embodiments
RLGWWRCYTLQVAREVNTKQR

SEQ ID NO: 4414 - protein, 21 aa, Artificial Sequence
  Description of Artificial Sequence: Synthetic peptide
  N-term H or Acetyl
  MOD_RES (7)..(7): Modified Cys
  MOD_RES (9)..(9): Thr or Phospho-Thr
  See specification as filed for detailed description of substitutions and preferred embodiments
RLGWWRCYTLQVARQGNTKQR

SEQ ID NO: 4415 - protein, 21 aa, Artificial Sequence
  Description of Artificial Sequence: Synthetic peptide
  N-term H or Acetyl
  MOD_RES (7)..(7): Modified Cys
  MOD_RES (9)..(9): Thr or Phospho-Thr
  See specification as filed for detailed description of substitutions and preferred embodiments
RLGWWRCYTLQVARQVNTKQR

SEQ ID NO: 4416 - protein, 21 aa, Artificial Sequence
  Description of Artificial Sequence: Synthetic peptide
  N-term H or Acetyl
  MOD_RES (7)..(7): Modified Cys
  MOD_RES (9)..(9): Thr or Phospho-Thr
  See specification as filed for detailed description of substitutions and preferred embodiments
RLGWWRCYTLQVERDGNTKQR

SEQ ID NO: 4417 - protein, 21 aa, Artificial Sequence
  Description of Artificial Sequence: Synthetic peptide
  N-term H or Acetyl
  MOD_RES (7)..(7): Modified Cys
  MOD_RES (9)..(9): Thr or Phospho-Thr
  See specification as filed for detailed description of substitutions and preferred embodiments
RLGWWRCYTLQVERDVNTKQR

SEQ ID NO: 4418 - protein, 21 aa, Artificial Sequence
  Description of Artificial Sequence: Synthetic peptide
  N-term H or Acetyl
  MOD_RES (7)..(7): Modified Cys
  MOD_RES (9)..(9): Thr or Phospho-Thr
  See specification as filed for detailed description of substitutions and preferred embodiments
RLGWWRCYTLQVEREGNTKQR

SEQ ID NO: 4419 - protein, 21 aa, Artificial Sequence
  Description of Artificial Sequence: Synthetic peptide
  N-term H or Acetyl
  MOD_RES (7)..(7): Modified Cys
  MOD_RES (9)..(9): Thr or Phospho-Thr
  See specification as filed for detailed description of substitutions and preferred embodiments
RLGWWRCYTLQVEREVNTKQR

SEQ ID NO: 4420 - protein, 21 aa, Artificial Sequence
  Description of Artificial Sequence: Synthetic peptide
  N-term H or Acetyl
  MOD_RES (7)..(7): Modified Cys
  MOD_RES (9)..(9): Thr or Phospho-Thr
  See specification as filed for detailed description of substitutions and preferred embodiments
RLGWWRCYTLQVERQGNTKQR

SEQ ID NO: 4421 - protein, 21 aa, Artificial Sequence
  Description of Artificial Sequence: Synthetic peptide
  N-term H or Acetyl
  MOD_RES (7)..(7): Modified Cys
  MOD_RES (9)..(9): Thr or Phospho-Thr
  See specification as filed for detailed description of substitutions and preferred embodiments
RLGWWRCYTLQVERQVNTKQR

SEQ ID NO: 4422 - protein, 21 aa, Artificial Sequence
  Description of Artificial Sequence: Synthetic peptide
  N-term H or Acetyl
  MOD_RES (7)..(7): Modified Cys
  MOD_RES (9)..(9): Thr or Phospho-Thr
  See specification as filed for detailed description of substitutions and preferred embodiments
RLGWWRCYTLRRARDGNTKQR

SEQ ID NO: 4423 - protein, 21 aa, Artificial Sequence
  Description of Artificial Sequence: Synthetic peptide
  N-term H or Acetyl
  MOD_RES (7)..(7): Modified Cys
  MOD_RES (9)..(9): Thr or Phospho-Thr
  See specification as filed for detailed description of substitutions and preferred embodiments
RLGWWRCYTLRRARDVNTKQR

SEQ ID NO: 4424 - protein, 21 aa, Artificial Sequence
  Description of Artificial Sequence: Synthetic peptide
  N-term H or Acetyl
  MOD_RES (7)..(7): Modified Cys
  MOD_RES (9)..(9): Thr or Phospho-Thr
  See specification as filed for detailed description of substitutions and preferred embodiments
RLGWWRCYTLRRAREGNTKQR

SEQ ID NO: 4425 - protein, 21 aa, Artificial Sequence
  Description of Artificial Sequence: Synthetic peptide
  N-term H or Acetyl
  MOD_RES (7)..(7): Modified Cys
  MOD_RES (9)..(9): Thr or Phospho-Thr
  See specification as filed for detailed description of substitutions and preferred embodiments
RLGWWRCYTLRRAREVNTKQR

SEQ ID NO: 4426 - protein, 21 aa, Artificial Sequence
  Description of Artificial Sequence: Synthetic peptide
  N-term H or Acetyl
  MOD_RES (7)..(7): Modified Cys
  MOD_RES (9)..(9): Thr or Phospho-Thr
  See specification as filed for detailed description of substitutions and preferred embodiments
RLGWWRCYTLRRARQGNTKQR

SEQ ID NO: 4427 - protein, 21 aa, Artificial Sequence
  Description of Artificial Sequence: Synthetic peptide
  N-term H or Acetyl
  MOD_RES (7)..(7): Modified Cys
  MOD_RES (9)..(9): Thr or Phospho-Thr
  See specification as filed for detailed description of substitutions and preferred embodiments
RLGWWRCYTLRRARQVNTKQR

SEQ ID NO: 4428 - protein, 21 aa, Artificial Sequence
  Description of Artificial Sequence: Synthetic peptide
  N-term H or Acetyl
  MOD_RES (7)..(7): Modified Cys
  MOD_RES (9)..(9): Thr or Phospho-Thr
  See specification as filed for detailed description of substitutions and preferred embodiments
RLGWWRCYTLRRERDGNTKQR

SEQ ID NO: 4429 - protein, 21 aa, Artificial Sequence
  Description of Artificial Sequence: Synthetic peptide
  N-term H or Acetyl
  MOD_RES (7)..(7): Modified Cys
  MOD_RES (9)..(9): Thr or Phospho-Thr
  See specification as filed for detailed description of substitutions and preferred embodiments
RLGWWRCYTLRRERDVNTKQR

SEQ ID NO: 4430 - protein, 21 aa, Artificial Sequence
  Description of Artificial Sequence: Synthetic peptide
  N-term H or Acetyl
  MOD_RES (7)..(7): Modified Cys
  MOD_RES (9)..(9): Thr or Phospho-Thr
  See specification as filed for detailed description of substitutions and preferred embodiments
RLGWWRCYTLRREREGNTKQR

SEQ ID NO: 4431 - protein, 21 aa, Artificial Sequence
  Description of Artificial Sequence: Synthetic peptide
  N-term H or Acetyl
  MOD_RES (7)..(7): Modified Cys
  MOD_RES (9)..(9): Thr or Phospho-Thr
  See specification as filed for detailed description of substitutions and preferred embodiments
RLGWWRCYTLRREREVNTKQR

SEQ ID NO: 4432 - protein, 21 aa, Artificial Sequence
  Description of Artificial Sequence: Synthetic peptide
  N-term H or Acetyl
  MOD_RES (7)..(7): Modified Cys
  MOD_RES (9)..(9): Thr or Phospho-Thr
  See specification as filed for detailed description of substitutions and preferred embodiments
RLGWWRCYTLRRERQGNTKQR

SEQ ID NO: 4433 - protein, 21 aa, Artificial Sequence
  Description of Artificial Sequence: Synthetic peptide
  N-term H or Acetyl
  MOD_RES (7)..(7): Modified Cys
  MOD_RES (9)..(9): Thr or Phospho-Thr
  See specification as filed for detailed description of substitutions and preferred embodiments
RLGWWRCYTLRRERQVNTKQR

SEQ ID NO: 4434 - protein, 21 aa, Artificial Sequence
  Description of Artificial Sequence: Synthetic peptide
  N-term H or Acetyl
  MOD_RES (7)..(7): Modified Cys
  MOD_RES (9)..(9): Thr or Phospho-Thr
  See specification as filed for detailed description of substitutions and preferred embodiments
RLGWWRCYTLRVARDGNTKQR

SEQ ID NO: 4435 - protein, 21 aa, Artificial Sequence
  Description of Artificial Sequence: Synthetic peptide
  N-term H or Acetyl
  MOD_RES (7)..(7): Modified Cys
  MOD_RES (9)..(9): Thr or Phospho-Thr
  See specification as filed for detailed description of substitutions and preferred embodiments
RLGWWRCYTLRVARDVNTKQR

SEQ ID NO: 4436 - protein, 21 aa, Artificial Sequence
  Description of Artificial Sequence: Synthetic peptide
  N-term H or Acetyl
  MOD_RES (7)..(7): Modified Cys
  MOD_RES (9)..(9): Thr or Phospho-Thr
  See specification as filed for detailed description of substitutions and preferred embodiments
RLGWWRCYTLRVAREGNTKQR

SEQ ID NO: 4437 - protein, 21 aa, Artificial Sequence
  Description of Artificial Sequence: Synthetic peptide
  N-term H or Acetyl
  MOD_RES (7)..(7): Modified Cys
  MOD_RES (9)..(9): Thr or Phospho-Thr
  See specification as filed for detailed description of substitutions and preferred embodiments
RLGWWRCYTLRVAREVNTKQR

SEQ ID NO: 4438 - protein, 21 aa, Artificial Sequence
  Description of Artificial Sequence: Synthetic peptide
  N-term H or Acetyl
  MOD_RES (7)..(7): Modified Cys
  MOD_RES (9)..(9): Thr or Phospho-Thr
  See specification as filed for detailed description of substitutions and preferred embodiments
RLGWWRCYTLRVARQGNTKQR

SEQ ID NO: 4439 - protein, 21 aa, Artificial Sequence
  Description of Artificial Sequence: Synthetic peptide
  N-term H or Acetyl
  MOD_RES (7)..(7): Modified Cys
  MOD_RES (9)..(9): Thr or Phospho-Thr
  See specification as filed for detailed description of substitutions and preferred embodiments
RLGWWRCYTLRVARQVNTKQR

SEQ ID NO: 4440 - protein, 21 aa, Artificial Sequence
  Description of Artificial Sequence: Synthetic peptide
  N-term H or Acetyl
  MOD_RES (7)..(7): Modified Cys
  MOD_RES (9)..(9): Thr or Phospho-Thr
  See specification as filed for detailed description of substitutions and preferred embodiments
RLGWWRCYTLRVERDGNTKQR

SEQ ID NO: 4441 - protein, 21 aa, Artificial Sequence
  Description of Artificial Sequence: Synthetic peptide
  N-term H or Acetyl
  MOD_RES (7)..(7): Modified Cys
  MOD_RES (9)..(9): Thr or Phospho-Thr
  See specification as filed for detailed description of substitutions and preferred embodiments
RLGWWRCYTLRVERDVNTKQR

SEQ ID NO: 4442 - protein, 21 aa, Artificial Sequence
  Description of Artificial Sequence: Synthetic peptide
  N-term H or Acetyl
  MOD_RES (7)..(7): Modified Cys
  MOD_RES (9)..(9): Thr or Phospho-Thr
  See specification as filed for detailed description of substitutions and preferred embodiments
RLGWWRCYTLRVEREGNTKQR

SEQ ID NO: 4443 - protein, 21 aa, Artificial Sequence
  Description of Artificial Sequence: Synthetic peptide
  N-term H or Acetyl
  MOD_RES (7)..(7): Modified Cys
  MOD_RES (9)..(9): Thr or Phospho-Thr
  See specification as filed for detailed description of substitutions and preferred embodiments
RLGWWRCYTLRVEREVNTKQR

SEQ ID NO: 4444 - protein, 21 aa, Artificial Sequence
  Description of Artificial Sequence: Synthetic peptide
  N-term H or Acetyl
  MOD_RES (7)..(7): Modified Cys
  MOD_RES (9)..(9): Thr or Phospho-Thr
  See specification as filed for detailed description of substitutions and preferred embodiments
RLGWWRCYTLRVERQGNTKQR

SEQ ID NO: 4445 - protein, 21 aa, Artificial Sequence
  Description of Artificial Sequence: Synthetic peptide
  N-term H or Acetyl
  MOD_RES (7)..(7): Modified Cys
  MOD_RES (9)..(9): Thr or Phospho-Thr
  See specification as filed for detailed description of substitutions and preferred embodiments
RLGWWRCYTLRVERQVNTKQR

SEQ ID NO: 4446 - protein, 21 aa, Artificial Sequence
  Description of Artificial Sequence: Synthetic peptide
  N-term H or Acetyl
  MOD_RES (7)..(7): Modified Cys
  MOD_RES (9)..(9): Thr or Phospho-Thr
  See specification as filed for detailed description of substitutions and preferred embodiments
RLGWWRCYTLVRARDGNTKQR

SEQ ID NO: 4447 - protein, 21 aa, Artificial Sequence
  Description of Artificial Sequence: Synthetic peptide
  N-term H or Acetyl
  MOD_RES (7)..(7): Modified Cys
  MOD_RES (9)..(9): Thr or Phospho-Thr
  See specification as filed for detailed description of substitutions and preferred embodiments
RLGWWRCYTLVRARDVNTKQR

SEQ ID NO: 4448 - protein, 21 aa, Artificial Sequence
  Description of Artificial Sequence: Synthetic peptide
  N-term H or Acetyl
  MOD_RES (7)..(7): Modified Cys
  MOD_RES (9)..(9): Thr or Phospho-Thr
  See specification as filed for detailed description of substitutions and preferred embodiments
RLGWWRCYTLVRAREGNTKQR

SEQ ID NO: 4449 - protein, 21 aa, Artificial Sequence
  Description of Artificial Sequence: Synthetic peptide
  N-term H or Acetyl
  MOD_RES (7)..(7): Modified Cys
  MOD_RES (9)..(9): Thr or Phospho-Thr
  See specification as filed for detailed description of substitutions and preferred embodiments
RLGWWRCYTLVRAREVNTKQR

SEQ ID NO: 4450 - protein, 21 aa, Artificial Sequence
  Description of Artificial Sequence: Synthetic peptide
  N-term H or Acetyl
  MOD_RES (7)..(7): Modified Cys
  MOD_RES (9)..(9): Thr or Phospho-Thr
  See specification as filed for detailed description of substitutions and preferred embodiments
RLGWWRCYTLVRARQGNTKQR

SEQ ID NO: 4451 - protein, 21 aa, Artificial Sequence
  Description of Artificial Sequence: Synthetic peptide
  N-term H or Acetyl
  MOD_RES (7)..(7): Modified Cys
  MOD_RES (9)..(9): Thr or Phospho-Thr
  See specification as filed for detailed description of substitutions and preferred embodiments
RLGWWRCYTLVRARQVNTKQR

SEQ ID NO: 4452 - protein, 21 aa, Artificial Sequence
  Description of Artificial Sequence: Synthetic peptide
  N-term H or Acetyl
  MOD_RES (7)..(7): Modified Cys
  MOD_RES (9)..(9): Thr or Phospho-Thr
  See specification as filed for detailed description of substitutions and preferred embodiments
RLGWWRCYTLVRERDGNTKQR

SEQ ID NO: 4453 - protein, 21 aa, Artificial Sequence
  Description of Artificial Sequence: Synthetic peptide
  N-term H or Acetyl
  MOD_RES (7)..(7): Modified Cys
  MOD_RES (9)..(9): Thr or Phospho-Thr
  See specification as filed for detailed description of substitutions and preferred embodiments
RLGWWRCYTLVRERDVNTKQR

SEQ ID NO: 4454 - protein, 21 aa, Artificial Sequence
  Description of Artificial Sequence: Synthetic peptide
  N-term H or Acetyl
  MOD_RES (7)..(7): Modified Cys
  MOD_RES (9)..(9): Thr or Phospho-Thr
  See specification as filed for detailed description of substitutions and preferred embodiments
RLGWWRCYTLVREREGNTKQR

SEQ ID NO: 4455 - protein, 21 aa, Artificial Sequence
  Description of Artificial Sequence: Synthetic peptide
  N-term H or Acetyl
  MOD_RES (7)..(7): Modified Cys
  MOD_RES (9)..(9): Thr or Phospho-Thr
  See specification as filed for detailed description of substitutions and preferred embodiments
RLGWWRCYTLVREREVNTKQR

SEQ ID NO: 4456 - protein, 21 aa, Artificial Sequence
  Description of Artificial Sequence: Synthetic peptide
  N-term H or Acetyl
  MOD_RES (7)..(7): Modified Cys
  MOD_RES (9)..(9): Thr or Phospho-Thr
  See specification as filed for detailed description of substitutions and preferred embodiments
RLGWWRCYTLVRERQGNTKQR

SEQ ID NO: 4457 - protein, 21 aa, Artificial Sequence
  Description of Artificial Sequence: Synthetic peptide
  N-term H or Acetyl
  MOD_RES (7)..(7): Modified Cys
  MOD_RES (9)..(9): Thr or Phospho-Thr
  See specification as filed for detailed description of substitutions and preferred embodiments
RLGWWRCYTLVRERQVNTKQR

SEQ ID NO: 4458 - protein, 21 aa, Artificial Sequence
  Description of Artificial Sequence: Synthetic peptide
  N-term H or Acetyl
  MOD_RES (7)..(7): Modified Cys
  MOD_RES (9)..(9): Thr or Phospho-Thr
  See specification as filed for detailed description of substitutions and preferred embodiments
RLGWWRCYTLVVARDGNTKQR

SEQ ID NO: 4459 - protein, 21 aa, Artificial Sequence
  Description of Artificial Sequence: Synthetic peptide
  N-term H or Acetyl
  MOD_RES (7)..(7): Modified Cys
  MOD_RES (9)..(9): Thr or Phospho-Thr
  See specification as filed for detailed description of substitutions and preferred embodiments
RLGWWRCYTLVVARDVNTKQR

SEQ ID NO: 4460 - protein, 21 aa, Artificial Sequence
  Description of Artificial Sequence: Synthetic peptide
  N-term H or Acetyl
  MOD_RES (7)..(7): Modified Cys
  MOD_RES (9)..(9): Thr or Phospho-Thr
  See specification as filed for detailed description of substitutions and preferred embodiments
RLGWWRCYTLVVAREGNTKQR

SEQ ID NO: 4461 - protein, 21 aa, Artificial Sequence
  Description of Artificial Sequence: Synthetic peptide
  N-term H or Acetyl
  MOD_RES (7)..(7): Modified Cys
  MOD_RES (9)..(9): Thr or Phospho-Thr
  See specification as filed for detailed description of substitutions and preferred embodiments
RLGWWRCYTLVVAREVNTKQR

SEQ ID NO: 4462 - protein, 21 aa, Artificial Sequence
  Description of Artificial Sequence: Synthetic peptide
  N-term H or Acetyl
  MOD_RES (7)..(7): Modified Cys
  MOD_RES (9)..(9): Thr or Phospho-Thr
  See specification as filed for detailed description of substitutions and preferred embodiments
RLGWWRCYTLVVARQGNTKQR

SEQ ID NO: 4463 - protein, 21 aa, Artificial Sequence
  Description of Artificial Sequence: Synthetic peptide
  N-term H or Acetyl
  MOD_RES (7)..(7): Modified Cys
  MOD_RES (9)..(9): Thr or Phospho-Thr
  See specification as filed for detailed description of substitutions and preferred embodiments
RLGWWRCYTLVVARQVNTKQR

SEQ ID NO: 4464 - protein, 21 aa, Artificial Sequence
  Description of Artificial Sequence: Synthetic peptide
  N-term H or Acetyl
  MOD_RES (7)..(7): Modified Cys
  MOD_RES (9)..(9): Thr or Phospho-Thr
  See specification as filed for detailed description of substitutions and preferred embodiments
RLGWWRCYTLVVERDGNTKQR

SEQ ID NO: 4465 - protein, 21 aa, Artificial Sequence
  Description of Artificial Sequence: Synthetic peptide
  N-term H or Acetyl
  MOD_RES (7)..(7): Modified Cys
  MOD_RES (9)..(9): Thr or Phospho-Thr
  See specification as filed for detailed description of substitutions and preferred embodiments
RLGWWRCYTLVVERDVNTKQR

SEQ ID NO: 4466 - protein, 21 aa, Artificial Sequence
  Description of Artificial Sequence: Synthetic peptide
  N-term H or Acetyl
  MOD_RES (7)..(7): Modified Cys
  MOD_RES (9)..(9): Thr or Phospho-Thr
  See specification as filed for detailed description of substitutions and preferred embodiments
RLGWWRCYTLVVEREGNTKQR

SEQ ID NO: 4467 - protein, 21 aa, Artificial Sequence
  Description of Artificial Sequence: Synthetic peptide
  N-term H or Acetyl
  MOD_RES (7)..(7): Modified Cys
  MOD_RES (9)..(9): Thr or Phospho-Thr
  See specification as filed for detailed description of substitutions and preferred embodiments
RLGWWRCYTLVVEREVNTKQR

SEQ ID NO: 4468 - protein, 21 aa, Artificial Sequence
  Description of Artificial Sequence: Synthetic peptide
  N-term H or Acetyl
  MOD_RES (7)..(7): Modified Cys
  MOD_RES (9)..(9): Thr or Phospho-Thr
  See specification as filed for detailed description of substitutions and preferred embodiments
RLGWWRCYTLVVERQGNTKQR

SEQ ID NO: 4469 - protein, 21 aa, Artificial Sequence
  Description of Artificial Sequence: Synthetic peptide
  N-term H or Acetyl
  MOD_RES (7)..(7): Modified Cys
  MOD_RES (9)..(9): Thr or Phospho-Thr
  See specification as filed for detailed description of substitutions and preferred embodiments
RLGWWRCYTLVVERQVNTKQR

SEQ ID NO: 4470 - protein, 21 aa, Artificial Sequence
  Description of Artificial Sequence: Synthetic peptide
  N-term H or Acetyl
  MOD_RES (7)..(7): Modified Cys
  MOD_RES (9)..(9): Thr or Phospho-Thr
  See specification as filed for detailed description of substitutions and preferred embodiments
RLGWWRCYTWQRARDGNTKQR

SEQ ID NO: 4471 - protein, 21 aa, Artificial Sequence
  Description of Artificial Sequence: Synthetic peptide
  N-term H or Acetyl
  MOD_RES (7)..(7): Modified Cys
  MOD_RES (9)..(9): Thr or Phospho-Thr
  See specification as filed for detailed description of substitutions and preferred embodiments
RLGWWRCYTWQRARDVNTKQR

SEQ ID NO: 4472 - protein, 21 aa, Artificial Sequence
  Description of Artificial Sequence: Synthetic peptide
  N-term H or Acetyl
  MOD_RES (7)..(7): Modified Cys
  MOD_RES (9)..(9): Thr or Phospho-Thr
  See specification as filed for detailed description of substitutions and preferred embodiments
RLGWWRCYTWQRAREGNTKQR

SEQ ID NO: 4473 - protein, 21 aa, Artificial Sequence
  Description of Artificial Sequence: Synthetic peptide
  N-term H or Acetyl
  MOD_RES (7)..(7): Modified Cys
  MOD_RES (9)..(9): Thr or Phospho-Thr
  See specification as filed for detailed description of substitutions and preferred embodiments
RLGWWRCYTWQRAREVNTKQR

SEQ ID NO: 4474 - protein, 21 aa, Artificial Sequence
  Description of Artificial Sequence: Synthetic peptide
  N-term H or Acetyl
  MOD_RES (7)..(7): Modified Cys
  MOD_RES (9)..(9): Thr or Phospho-Thr
  See specification as filed for detailed description of substitutions and preferred embodiments
RLGWWRCYTWQRARQGNTKQR

SEQ ID NO: 4475 - protein, 21 aa, Artificial Sequence
  Description of Artificial Sequence: Synthetic peptide
  N-term H or Acetyl
  MOD_RES (7)..(7): Modified Cys
  MOD_RES (9)..(9): Thr or Phospho-Thr
  See specification as filed for detailed description of substitutions and preferred embodiments
RLGWWRCYTWQRARQVNTKQR

SEQ ID NO: 4476 - protein, 21 aa, Artificial Sequence
  Description of Artificial Sequence: Synthetic peptide
  N-term H or Acetyl
  MOD_RES (7)..(7): Modified Cys
  MOD_RES (9)..(9): Thr or Phospho-Thr
  See specification as filed for detailed description of substitutions and preferred embodiments
RLGWWRCYTWQRERDGNTKQR

SEQ ID NO: 4477 - protein, 21 aa, Artificial Sequence
  Description of Artificial Sequence: Synthetic peptide
  N-term H or Acetyl
  MOD_RES (7)..(7): Modified Cys
  MOD_RES (9)..(9): Thr or Phospho-Thr
  See specification as filed for detailed description of substitutions and preferred embodiments
RLGWWRCYTWQRERDVNTKQR

SEQ ID NO: 4478 - protein, 21 aa, Artificial Sequence
  Description of Artificial Sequence: Synthetic peptide
  N-term H or Acetyl
  MOD_RES (7)..(7): Modified Cys
  MOD_RES (9)..(9): Thr or Phospho-Thr
  See specification as filed for detailed description of substitutions and preferred embodiments
RLGWWRCYTWQREREGNTKQR

SEQ ID NO: 4479 - protein, 21 aa, Artificial Sequence
  Description of Artificial Sequence: Synthetic peptide
  N-term H or Acetyl
  MOD_RES (7)..(7): Modified Cys
  MOD_RES (9)..(9): Thr or Phospho-Thr
  See specification as filed for detailed description of substitutions and preferred embodiments
RLGWWRCYTWQREREVNTKQR

SEQ ID NO: 4480 - protein, 21 aa, Artificial Sequence
  Description of Artificial Sequence: Synthetic peptide
  N-term H or Acetyl
  MOD_RES (7)..(7): Modified Cys
  MOD_RES (9)..(9): Thr or Phospho-Thr
  See specification as filed for detailed description of substitutions and preferred embodiments
RLGWWRCYTWQRERQGNTKQR

SEQ ID NO: 4481 - protein, 21 aa, Artificial Sequence
  Description of Artificial Sequence: Synthetic peptide
  N-term H or Acetyl
  MOD_RES (7)..(7): Modified Cys
  MOD_RES (9)..(9): Thr or Phospho-Thr
  See specification as filed for detailed description of substitutions and preferred embodiments
RLGWWRCYTWQRERQVNTKQR

SEQ ID NO: 4482 - protein, 21 aa, Artificial Sequence
  Description of Artificial Sequence: Synthetic peptide
  N-term H or Acetyl
  MOD_RES (7)..(7): Modified Cys
  MOD_RES (9)..(9): Thr or Phospho-Thr
  See specification as filed for detailed description of substitutions and preferred embodiments
RLGWWRCYTWQVARDGNTKQR

SEQ ID NO: 4483 - protein, 21 aa, Artificial Sequence
  Description of Artificial Sequence: Synthetic peptide
  N-term H or Acetyl
  MOD_RES (7)..(7): Modified Cys
  MOD_RES (9)..(9): Thr or Phospho-Thr
  See specification as filed for detailed description of substitutions and preferred embodiments
RLGWWRCYTWQVARDVNTKQR

SEQ ID NO: 4484 - protein, 21 aa, Artificial Sequence
  Description of Artificial Sequence: Synthetic peptide
  N-term H or Acetyl
  MOD_RES (7)..(7): Modified Cys
  MOD_RES (9)..(9): Thr or Phospho-Thr
  See specification as filed for detailed description of substitutions and preferred embodiments
RLGWWRCYTWQVAREGNTKQR

SEQ ID NO: 4485 - protein, 21 aa, Artificial Sequence
  Description of Artificial Sequence: Synthetic peptide
  N-term H or Acetyl
  MOD_RES (7)..(7): Modified Cys
  MOD_RES (9)..(9): Thr or Phospho-Thr
  See specification as filed for detailed description of substitutions and preferred embodiments
RLGWWRCYTWQVAREVNTKQR

SEQ ID NO: 4486 - protein, 21 aa, Artificial Sequence
  Description of Artificial Sequence: Synthetic peptide
  N-term H or Acetyl
  MOD_RES (7)..(7): Modified Cys
  MOD_RES (9)..(9): Thr or Phospho-Thr
  See specification as filed for detailed description of substitutions and preferred embodiments
RLGWWRCYTWQVARQGNTKQR

SEQ ID NO: 4487 - protein, 21 aa, Artificial Sequence
  Description of Artificial Sequence: Synthetic peptide
  N-term H or Acetyl
  MOD_RES (7)..(7): Modified Cys
  MOD_RES (9)..(9): Thr or Phospho-Thr
  See specification as filed for detailed description of substitutions and preferred embodiments
RLGWWRCYTWQVARQVNTKQR

SEQ ID NO: 4488 - protein, 21 aa, Artificial Sequence
  Description of Artificial Sequence: Synthetic peptide
  N-term H or Acetyl
  MOD_RES (7)..(7): Modified Cys
  MOD_RES (9)..(9): Thr or Phospho-Thr
  See specification as filed for detailed description of substitutions and preferred embodiments
RLGWWRCYTWQVERDGNTKQR

SEQ ID NO: 4489 - protein, 21 aa, Artificial Sequence
  Description of Artificial Sequence: Synthetic peptide
  N-term H or Acetyl
  MOD_RES (7)..(7): Modified Cys
  MOD_RES (9)..(9): Thr or Phospho-Thr
  See specification as filed for detailed description of substitutions and preferred embodiments
RLGWWRCYTWQVERDVNTKQR

SEQ ID NO: 4490 - protein, 21 aa, Artificial Sequence
  Description of Artificial Sequence: Synthetic peptide
  N-term H or Acetyl
  MOD_RES (7)..(7): Modified Cys
  MOD_RES (9)..(9): Thr or Phospho-Thr
  See specification as filed for detailed description of substitutions and preferred embodiments
RLGWWRCYTWQVEREGNTKQR

SEQ ID NO: 4491 - protein, 21 aa, Artificial Sequence
  Description of Artificial Sequence: Synthetic peptide
  N-term H or Acetyl
  MOD_RES (7)..(7): Modified Cys
  MOD_RES (9)..(9): Thr or Phospho-Thr
  See specification as filed for detailed description of substitutions and preferred embodiments
RLGWWRCYTWQVEREVNTKQR

SEQ ID NO: 4492 - protein, 21 aa, Artificial Sequence
  Description of Artificial Sequence: Synthetic peptide
  N-term H or Acetyl
  MOD_RES (7)..(7): Modified Cys
  MOD_RES (9)..(9): Thr or Phospho-Thr
  See specification as filed for detailed description of substitutions and preferred embodiments
RLGWWRCYTWQVERQGNTKQR

SEQ ID NO: 4493 - protein, 21 aa, Artificial Sequence
  Description of Artificial Sequence: Synthetic peptide
  N-term H or Acetyl
  MOD_RES (7)..(7): Modified Cys
  MOD_RES (9)..(9): Thr or Phospho-Thr
  See specification as filed for detailed description of substitutions and preferred embodiments
RLGWWRCYTWQVERQVNTKQR

SEQ ID NO: 4494 - protein, 21 aa, Artificial Sequence
  Description of Artificial Sequence: Synthetic peptide
  N-term H or Acetyl
  MOD_RES (7)..(7): Modified Cys
  MOD_RES (9)..(9): Thr or Phospho-Thr
  See specification as filed for detailed description of substitutions and preferred embodiments
RLGWWRCYTWRRARDGNTKQR

SEQ ID NO: 4495 - protein, 21 aa, Artificial Sequence
  Description of Artificial Sequence: Synthetic peptide
  N-term H or Acetyl
  MOD_RES (7)..(7): Modified Cys
  MOD_RES (9)..(9): Thr or Phospho-Thr
  See specification as filed for detailed description of substitutions and preferred embodiments
RLGWWRCYTWRRARDVNTKQR

SEQ ID NO: 4496 - protein, 21 aa, Artificial Sequence
  Description of Artificial Sequence: Synthetic peptide
  N-term H or Acetyl
  MOD_RES (7)..(7): Modified Cys
  MOD_RES (9)..(9): Thr or Phospho-Thr
  See specification as filed for detailed description of substitutions and preferred embodiments
RLGWWRCYTWRRAREGNTKQR

SEQ ID NO: 4497 - protein, 21 aa, Artificial Sequence
  Description of Artificial Sequence: Synthetic peptide
  N-term H or Acetyl
  MOD_RES (7)..(7): Modified Cys
  MOD_RES (9)..(9): Thr or Phospho-Thr
  See specification as filed for detailed description of substitutions and preferred embodiments
RLGWWRCYTWRRAREVNTKQR

SEQ ID NO: 4498 - protein, 21 aa, Artificial Sequence
  Description of Artificial Sequence: Synthetic peptide
  N-term H or Acetyl
  MOD_RES (7)..(7): Modified Cys
  MOD_RES (9)..(9): Thr or Phospho-Thr
  See specification as filed for detailed description of substitutions and preferred embodiments
RLGWWRCYTWRRARQGNTKQR

SEQ ID NO: 4499 - protein, 21 aa, Artificial Sequence
  Description of Artificial Sequence: Synthetic peptide
  N-term H or Acetyl
  MOD_RES (7)..(7): Modified Cys
  MOD_RES (9)..(9): Thr or Phospho-Thr
  See specification as filed for detailed description of substitutions and preferred embodiments
RLGWWRCYTWRRARQVNTKQR

SEQ ID NO: 4500 - protein, 21 aa, Artificial Sequence
  Description of Artificial Sequence: Synthetic peptide
  N-term H or Acetyl
  MOD_RES (7)..(7): Modified Cys
  MOD_RES (9)..(9): Thr or Phospho-Thr
  See specification as filed for detailed description of substitutions and preferred embodiments
RLGWWRCYTWRRERDGNTKQR

SEQ ID NO: 4501 - protein, 21 aa, Artificial Sequence
  Description of Artificial Sequence: Synthetic peptide
  N-term H or Acetyl
  MOD_RES (7)..(7): Modified Cys
  MOD_RES (9)..(9): Thr or Phospho-Thr
  See specification as filed for detailed description of substitutions and preferred embodiments
RLGWWRCYTWRRERDVNTKQR

SEQ ID NO: 4502 - protein, 21 aa, Artificial Sequence
  Description of Artificial Sequence: Synthetic peptide
  N-term H or Acetyl
  MOD_RES (7)..(7): Modified Cys
  MOD_RES (9)..(9): Thr or Phospho-Thr
  See specification as filed for detailed description of substitutions and preferred embodiments
RLGWWRCYTWRREREGNTKQR

SEQ ID NO: 4503 - protein, 21 aa, Artificial Sequence
  Description of Artificial Sequence: Synthetic peptide
  N-term H or Acetyl
  MOD_RES (7)..(7): Modified Cys
  MOD_RES (9)..(9): Thr or Phospho-Thr
  See specification as filed for detailed description of substitutions and preferred embodiments
RLGWWRCYTWRREREVNTKQR

SEQ ID NO: 4504 - protein, 21 aa, Artificial Sequence
  Description of Artificial Sequence: Synthetic peptide
  N-term H or Acetyl
  MOD_RES (7)..(7): Modified Cys
  MOD_RES (9)..(9): Thr or Phospho-Thr
  See specification as filed for detailed description of substitutions and preferred embodiments
RLGWWRCYTWRRERQGNTKQR

SEQ ID NO: 4505 - protein, 21 aa, Artificial Sequence
  Description of Artificial Sequence: Synthetic peptide
  N-term H or Acetyl
  MOD_RES (7)..(7): Modified Cys
  MOD_RES (9)..(9): Thr or Phospho-Thr
  See specification as filed for detailed description of substitutions and preferred embodiments
RLGWWRCYTWRRERQVNTKQR

SEQ ID NO: 4506 - protein, 21 aa, Artificial Sequence
  Description of Artificial Sequence: Synthetic peptide
  N-term H or Acetyl
  MOD_RES (7)..(7): Modified Cys
  MOD_RES (9)..(9): Thr or Phospho-Thr
  See specification as filed for detailed description of substitutions and preferred embodiments
RLGWWRCYTWRVARDGNTKQR

SEQ ID NO: 4507 - protein, 21 aa, Artificial Sequence
  Description of Artificial Sequence: Synthetic peptide
  N-term H or Acetyl
  MOD_RES (7)..(7): Modified Cys
  MOD_RES (9)..(9): Thr or Phospho-Thr
  See specification as filed for detailed description of substitutions and preferred embodiments
RLGWWRCYTWRVARDVNTKQR

SEQ ID NO: 4508 - protein, 21 aa, Artificial Sequence
  Description of Artificial Sequence: Synthetic peptide
  N-term H or Acetyl
  MOD_RES (7)..(7): Modified Cys
  MOD_RES (9)..(9): Thr or Phospho-Thr
  See specification as filed for detailed description of substitutions and preferred embodiments
RLGWWRCYTWRVAREGNTKQR

SEQ ID NO: 4509 - protein, 21 aa, Artificial Sequence
  Description of Artificial Sequence: Synthetic peptide
  N-term H or Acetyl
  MOD_RES (7)..(7): Modified Cys
  MOD_RES (9)..(9): Thr or Phospho-Thr
  See specification as filed for detailed description of substitutions and preferred embodiments
RLGWWRCYTWRVAREVNTKQR

SEQ ID NO: 4510 - protein, 21 aa, Artificial Sequence
  Description of Artificial Sequence: Synthetic peptide
  N-term H or Acetyl
  MOD_RES (7)..(7): Modified Cys
  MOD_RES (9)..(9): Thr or Phospho-Thr
  See specification as filed for detailed description of substitutions and preferred embodiments
RLGWWRCYTWRVARQGNTKQR

SEQ ID NO: 4511 - protein, 21 aa, Artificial Sequence
  Description of Artificial Sequence: Synthetic peptide
  N-term H or Acetyl
  MOD_RES (7)..(7): Modified Cys
  MOD_RES (9)..(9): Thr or Phospho-Thr
  See specification as filed for detailed description of substitutions and preferred embodiments
RLGWWRCYTWRVARQVNTKQR

SEQ ID NO: 4512 - protein, 21 aa, Artificial Sequence
  Description of Artificial Sequence: Synthetic peptide
  N-term H or Acetyl
  MOD_RES (7)..(7): Modified Cys
  MOD_RES (9)..(9): Thr or Phospho-Thr
  See specification as filed for detailed description of substitutions and preferred embodiments
RLGWWRCYTWRVERDGNTKQR

SEQ ID NO: 4513 - protein, 21 aa, Artificial Sequence
  Description of Artificial Sequence: Synthetic peptide
  N-term H or Acetyl
  MOD_RES (7)..(7): Modified Cys
  MOD_RES (9)..(9): Thr or Phospho-Thr
  See specification as filed for detailed description of substitutions and preferred embodiments
RLGWWRCYTWRVERDVNTKQR

SEQ ID NO: 4514 - protein, 21 aa, Artificial Sequence
  Description of Artificial Sequence: Synthetic peptide
  N-term H or Acetyl
  MOD_RES (7)..(7): Modified Cys
  MOD_RES (9)..(9): Thr or Phospho-Thr
  See specification as filed for detailed description of substitutions and preferred embodiments
RLGWWRCYTWRVEREGNTKQR

SEQ ID NO: 4515 - protein, 21 aa, Artificial Sequence
  Description of Artificial Sequence: Synthetic peptide
  N-term H or Acetyl
  MOD_RES (7)..(7): Modified Cys
  MOD_RES (9)..(9): Thr or Phospho-Thr
  See specification as filed for detailed description of substitutions and preferred embodiments
RLGWWRCYTWRVEREVNTKQR

SEQ ID NO: 4516 - protein, 21 aa, Artificial Sequence
  Description of Artificial Sequence: Synthetic peptide
  N-term H or Acetyl
  MOD_RES (7)..(7): Modified Cys
  MOD_RES (9)..(9): Thr or Phospho-Thr
  See specification as filed for detailed description of substitutions and preferred embodiments
RLGWWRCYTWRVERQGNTKQR

SEQ ID NO: 4517 - protein, 21 aa, Artificial Sequence
  Description of Artificial Sequence: Synthetic peptide
  N-term H or Acetyl
  MOD_RES (7)..(7): Modified Cys
  MOD_RES (9)..(9): Thr or Phospho-Thr
  See specification as filed for detailed description of substitutions and preferred embodiments
RLGWWRCYTWRVERQVNTKQR

SEQ ID NO: 4518 - protein, 21 aa, Artificial Sequence
  Description of Artificial Sequence: Synthetic peptide
  N-term H or Acetyl
  MOD_RES (7)..(7): Modified Cys
  MOD_RES (9)..(9): Thr or Phospho-Thr
  See specification as filed for detailed description of substitutions and preferred embodiments
RLGWWRCYTWVRARDGNTKQR

SEQ ID NO: 4519 - protein, 21 aa, Artificial Sequence
  Description of Artificial Sequence: Synthetic peptide
  N-term H or Acetyl
  MOD_RES (7)..(7): Modified Cys
  MOD_RES (9)..(9): Thr or Phospho-Thr
  See specification as filed for detailed description of substitutions and preferred embodiments
RLGWWRCYTWVRARDVNTKQR

SEQ ID NO: 4520 - protein, 21 aa, Artificial Sequence
  Description of Artificial Sequence: Synthetic peptide
  N-term H or Acetyl
  MOD_RES (7)..(7): Modified Cys
  MOD_RES (9)..(9): Thr or Phospho-Thr
  See specification as filed for detailed description of substitutions and preferred embodiments
RLGWWRCYTWVRAREGNTKQR

SEQ ID NO: 4521 - protein, 21 aa, Artificial Sequence
  Description of Artificial Sequence: Synthetic peptide
  N-term H or Acetyl
  MOD_RES (7)..(7): Modified Cys
  MOD_RES (9)..(9): Thr or Phospho-Thr
  See specification as filed for detailed description of substitutions and preferred embodiments
RLGWWRCYTWVRAREVNTKQR

SEQ ID NO: 4522 - protein, 21 aa, Artificial Sequence
  Description of Artificial Sequence: Synthetic peptide
  N-term H or Acetyl
  MOD_RES (7)..(7): Modified Cys
  MOD_RES (9)..(9): Thr or Phospho-Thr
  See specification as filed for detailed description of substitutions and preferred embodiments
RLGWWRCYTWVRARQGNTKQR

SEQ ID NO: 4523 - protein, 21 aa, Artificial Sequence
  Description of Artificial Sequence: Synthetic peptide
  N-term H or Acetyl
  MOD_RES (7)..(7): Modified Cys
  MOD_RES (9)..(9): Thr or Phospho-Thr
  See specification as filed for detailed description of substitutions and preferred embodiments
RLGWWRCYTWVRARQVNTKQR

SEQ ID NO: 4524 - protein, 21 aa, Artificial Sequence
  Description of Artificial Sequence: Synthetic peptide
  N-term H or Acetyl
  MOD_RES (7)..(7): Modified Cys
  MOD_RES (9)..(9): Thr or Phospho-Thr
  See specification as filed for detailed description of substitutions and preferred embodiments
RLGWWRCYTWVRERDGNTKQR

SEQ ID NO: 4525 - protein, 21 aa, Artificial Sequence
  Description of Artificial Sequence: Synthetic peptide
  N-term H or Acetyl
  MOD_RES (7)..(7): Modified Cys
  MOD_RES (9)..(9): Thr or Phospho-Thr
  See specification as filed for detailed description of substitutions and preferred embodiments
RLGWWRCYTWVRERDVNTKQR

SEQ ID NO: 4526 - protein, 21 aa, Artificial Sequence
  Description of Artificial Sequence: Synthetic peptide
  N-term H or Acetyl
  MOD_RES (7)..(7): Modified Cys
  MOD_RES (9)..(9): Thr or Phospho-Thr
  See specification as filed for detailed description of substitutions and preferred embodiments
RLGWWRCYTWVREREGNTKQR

SEQ ID NO: 4527 - protein, 21 aa, Artificial Sequence
  Description of Artificial Sequence: Synthetic peptide
  N-term H or Acetyl
  MOD_RES (7)..(7): Modified Cys
  MOD_RES (9)..(9): Thr or Phospho-Thr
  See specification as filed for detailed description of substitutions and preferred embodiments
RLGWWRCYTWVREREVNTKQR

SEQ ID NO: 4528 - protein, 21 aa, Artificial Sequence
  Description of Artificial Sequence: Synthetic peptide
  N-term H or Acetyl
  MOD_RES (7)..(7): Modified Cys
  MOD_RES (9)..(9): Thr or Phospho-Thr
  See specification as filed for detailed description of substitutions and preferred embodiments
RLGWWRCYTWVRERQGNTKQR

SEQ ID NO: 4529 - protein, 21 aa, Artificial Sequence
  Description of Artificial Sequence: Synthetic peptide
  N-term H or Acetyl
  MOD_RES (7)..(7): Modified Cys
  MOD_RES (9)..(9): Thr or Phospho-Thr
  See specification as filed for detailed description of substitutions and preferred embodiments
RLGWWRCYTWVRERQVNTKQR

SEQ ID NO: 4530 - protein, 21 aa, Artificial Sequence
  Description of Artificial Sequence: Synthetic peptide
  N-term H or Acetyl
  MOD_RES (7)..(7): Modified Cys
  MOD_RES (9)..(9): Thr or Phospho-Thr
  See specification as filed for detailed description of substitutions and preferred embodiments
RLGWWRCYTWVVARDGNTKQR

SEQ ID NO: 4531 - protein, 21 aa, Artificial Sequence
  Description of Artificial Sequence: Synthetic peptide
  N-term H or Acetyl
  MOD_RES (7)..(7): Modified Cys
  MOD_RES (9)..(9): Thr or Phospho-Thr
  See specification as filed for detailed description of substitutions and preferred embodiments
RLGWWRCYTWVVARDVNTKQR

SEQ ID NO: 4532 - protein, 21 aa, Artificial Sequence
  Description of Artificial Sequence: Synthetic peptide
  N-term H or Acetyl
  MOD_RES (7)..(7): Modified Cys
  MOD_RES (9)..(9): Thr or Phospho-Thr
  See specification as filed for detailed description of substitutions and preferred embodiments
RLGWWRCYTWVVAREGNTKQR

SEQ ID NO: 4533 - protein, 21 aa, Artificial Sequence
  Description of Artificial Sequence: Synthetic peptide
  N-term H or Acetyl
  MOD_RES (7)..(7): Modified Cys
  MOD_RES (9)..(9): Thr or Phospho-Thr
  See specification as filed for detailed description of substitutions and preferred embodiments
RLGWWRCYTWVVAREVNTKQR

SEQ ID NO: 4534 - protein, 21 aa, Artificial Sequence
  Description of Artificial Sequence: Synthetic peptide
  N-term H or Acetyl
  MOD_RES (7)..(7): Modified Cys
  MOD_RES (9)..(9): Thr or Phospho-Thr
  See specification as filed for detailed description of substitutions and preferred embodiments
RLGWWRCYTWVVARQGNTKQR

SEQ ID NO: 4535 - protein, 21 aa, Artificial Sequence
  Description of Artificial Sequence: Synthetic peptide
  N-term H or Acetyl
  MOD_RES (7)..(7): Modified Cys
  MOD_RES (9)..(9): Thr or Phospho-Thr
  See specification as filed for detailed description of substitutions and preferred embodiments
RLGWWRCYTWVVARQVNTKQR

SEQ ID NO: 4536 - protein, 21 aa, Artificial Sequence
  Description of Artificial Sequence: Synthetic peptide
  N-term H or Acetyl
  MOD_RES (7)..(7): Modified Cys
  MOD_RES (9)..(9): Thr or Phospho-Thr
  See specification as filed for detailed description of substitutions and preferred embodiments
RLGWWRCYTWVVERDGNTKQR

SEQ ID NO: 4537 - protein, 21 aa, Artificial Sequence
  Description of Artificial Sequence: Synthetic peptide
  N-term H or Acetyl
  MOD_RES (7)..(7): Modified Cys
  MOD_RES (9)..(9): Thr or Phospho-Thr
  See specification as filed for detailed description of substitutions and preferred embodiments
RLGWWRCYTWVVERDVNTKQR

SEQ ID NO: 4538 - protein, 21 aa, Artificial Sequence
  Description of Artificial Sequence: Synthetic peptide
  N-term H or Acetyl
  MOD_RES (7)..(7): Modified Cys
  MOD_RES (9)..(9): Thr or Phospho-Thr
  See specification as filed for detailed description of substitutions and preferred embodiments
RLGWWRCYTWVVEREGNTKQR

SEQ ID NO: 4539 - protein, 21 aa, Artificial Sequence
  Description of Artificial Sequence: Synthetic peptide
  N-term H or Acetyl
  MOD_RES (7)..(7): Modified Cys
  MOD_RES (9)..(9): Thr or Phospho-Thr
  See specification as filed for detailed description of substitutions and preferred embodiments
RLGWWRCYTWVVEREVNTKQR

SEQ ID NO: 4540 - protein, 21 aa, Artificial Sequence
  Description of Artificial Sequence: Synthetic peptide
  N-term H or Acetyl
  MOD_RES (7)..(7): Modified Cys
  MOD_RES (9)..(9): Thr or Phospho-Thr
  See specification as filed for detailed description of substitutions and preferred embodiments
RLGWWRCYTWVVERQGNTKQR

SEQ ID NO: 4541 - protein, 21 aa, Artificial Sequence
  Description of Artificial Sequence: Synthetic peptide
  N-term H or Acetyl
  MOD_RES (7)..(7): Modified Cys
  MOD_RES (9)..(9): Thr or Phospho-Thr
  See specification as filed for detailed description of substitutions and preferred embodiments
RLGWWRCYTWVVERQVNTKQR

SEQ ID NO: 4542 - protein, 12 aa, Artificial Sequence
  Description of Artificial Sequence: Synthetic peptide
  N-term H or Acetyl
  MOD_RES (5)..(5): Modified Cys
  MOD_RES (7)..(7): Ser or Phospho-Ser
  See specification as filed for detailed description of substitutions and preferred embodiments
RLLRCSSRRIRR

SEQ ID NO: 4543 - protein, 21 aa, Artificial Sequence
  Description of Artificial Sequence: Synthetic peptide
  N-term H or Acetyl
  MOD_RES (7)..(7): Modified Cys
  MOD_RES (9)..(9): Thr or Phospho-Thr
  See specification as filed for detailed description of substitutions and preferred embodiments
RLPWWRCFTWVRERDVNTKQR

SEQ ID NO: 4544 - protein, 21 aa, Artificial Sequence
  Description of Artificial Sequence: Synthetic peptide
  N-term H or Acetyl
  MOD_RES (7)..(7): Modified Cys
  MOD_RES (9)..(9): Thr or Phospho-Thr
  See specification as filed for detailed description of substitutions and preferred embodiments
RLPWWRCFTWVVERDVNTKQR

SEQ ID NO: 4545 - protein, 21 aa, Artificial Sequence
  Description of Artificial Sequence: Synthetic peptide
  N-term H or Acetyl
  MOD_RES (7)..(7): Modified Cys
  MOD_RES (9)..(9): Thr or Phospho-Thr
  See specification as filed for detailed description of substitutions and preferred embodiments
RLPWWRCYTLQRARDGNTKQR

SEQ ID NO: 4546 - protein, 21 aa, Artificial Sequence
  Description of Artificial Sequence: Synthetic peptide
  N-term H or Acetyl
  MOD_RES (7)..(7): Modified Cys
  MOD_RES (9)..(9): Thr or Phospho-Thr
  See specification as filed for detailed description of substitutions and preferred embodiments
RLPWWRCYTLQRARDVNTKQR

SEQ ID NO: 4547 - protein, 21 aa, Artificial Sequence
  Description of Artificial Sequence: Synthetic peptide
  N-term H or Acetyl
  MOD_RES (7)..(7): Modified Cys
  MOD_RES (9)..(9): Thr or Phospho-Thr
  See specification as filed for detailed description of substitutions and preferred embodiments
RLPWWRCYTLQRAREGNTKQR

SEQ ID NO: 4548 - protein, 21 aa, Artificial Sequence
  Description of Artificial Sequence: Synthetic peptide
  N-term H or Acetyl
  MOD_RES (7)..(7): Modified Cys
  MOD_RES (9)..(9): Thr or Phospho-Thr
  See specification as filed for detailed description of substitutions and preferred embodiments
RLPWWRCYTLQRAREVNTKQR

SEQ ID NO: 4549 - protein, 21 aa, Artificial Sequence
  Description of Artificial Sequence: Synthetic peptide
  N-term H or Acetyl
  MOD_RES (7)..(7): Modified Cys
  MOD_RES (9)..(9): Thr or Phospho-Thr
  See specification as filed for detailed description of substitutions and preferred embodiments
RLPWWRCYTLQRARQGNTKQR

SEQ ID NO: 4550 - protein, 21 aa, Artificial Sequence
  Description of Artificial Sequence: Synthetic peptide
  N-term H or Acetyl
  MOD_RES (7)..(7): Modified Cys
  MOD_RES (9)..(9): Thr or Phospho-Thr
  See specification as filed for detailed description of substitutions and preferred embodiments
RLPWWRCYTLQRARQVNTKQR

SEQ ID NO: 4551 - protein, 21 aa, Artificial Sequence
  Description of Artificial Sequence: Synthetic peptide
  N-term H or Acetyl
  MOD_RES (7)..(7): Modified Cys
  MOD_RES (9)..(9): Thr or Phospho-Thr
  See specification as filed for detailed description of substitutions and preferred embodiments
RLPWWRCYTLQRERDGNTKQR

SEQ ID NO: 4552 - protein, 21 aa, Artificial Sequence
  Description of Artificial Sequence: Synthetic peptide
  N-term H or Acetyl
  MOD_RES (7)..(7): Modified Cys
  MOD_RES (9)..(9): Thr or Phospho-Thr
  See specification as filed for detailed description of substitutions and preferred embodiments
RLPWWRCYTLQRERDVNTKQR

SEQ ID NO: 4553 - protein, 21 aa, Artificial Sequence
  Description of Artificial Sequence: Synthetic peptide
  N-term H or Acetyl
  MOD_RES (7)..(7): Modified Cys
  MOD_RES (9)..(9): Thr or Phospho-Thr
  See specification as filed for detailed description of substitutions and preferred embodiments
RLPWWRCYTLQREREGNTKQR

SEQ ID NO: 4554 - protein, 21 aa, Artificial Sequence
  Description of Artificial Sequence: Synthetic peptide
  N-term H or Acetyl
  MOD_RES (7)..(7): Modified Cys
  MOD_RES (9)..(9): Thr or Phospho-Thr
  See specification as filed for detailed description of substitutions and preferred embodiments
RLPWWRCYTLQREREVNTKQR

SEQ ID NO: 4555 - protein, 21 aa, Artificial Sequence
  Description of Artificial Sequence: Synthetic peptide
  N-term H or Acetyl
  MOD_RES (7)..(7): Modified Cys
  MOD_RES (9)..(9): Thr or Phospho-Thr
  See specification as filed for detailed description of substitutions and preferred embodiments
RLPWWRCYTLQRERQGNTKQR

SEQ ID NO: 4556 - protein, 21 aa, Artificial Sequence
  Description of Artificial Sequence: Synthetic peptide
  N-term H or Acetyl
  MOD_RES (7)..(7): Modified Cys
  MOD_RES (9)..(9): Thr or Phospho-Thr
  See specification as filed for detailed description of substitutions and preferred embodiments
RLPWWRCYTLQRERQVNTKQR

SEQ ID NO: 4557 - protein, 21 aa, Artificial Sequence
  Description of Artificial Sequence: Synthetic peptide
  N-term H or Acetyl
  MOD_RES (7)..(7): Modified Cys
  MOD_RES (9)..(9): Thr or Phospho-Thr
  See specification as filed for detailed description of substitutions and preferred embodiments
RLPWWRCYTLQVARDGNTKQR

SEQ ID NO: 4558 - protein, 21 aa, Artificial Sequence
  Description of Artificial Sequence: Synthetic peptide
  N-term H or Acetyl
  MOD_RES (7)..(7): Modified Cys
  MOD_RES (9)..(9): Thr or Phospho-Thr
  See specification as filed for detailed description of substitutions and preferred embodiments
RLPWWRCYTLQVARDVNTKQR

SEQ ID NO: 4559 - protein, 21 aa, Artificial Sequence
  Description of Artificial Sequence: Synthetic peptide
  N-term H or Acetyl
  MOD_RES (7)..(7): Modified Cys
  MOD_RES (9)..(9): Thr or Phospho-Thr
  See specification as filed for detailed description of substitutions and preferred embodiments
RLPWWRCYTLQVAREGNTKQR

SEQ ID NO: 4560 - protein, 21 aa, Artificial Sequence
  Description of Artificial Sequence: Synthetic peptide
  N-term H or Acetyl
  MOD_RES (7)..(7): Modified Cys
  MOD_RES (9)..(9): Thr or Phospho-Thr
  See specification as filed for detailed description of substitutions and preferred embodiments
RLPWWRCYTLQVAREVNTKQR

SEQ ID NO: 4561 - protein, 21 aa, Artificial Sequence
  Description of Artificial Sequence: Synthetic peptide
  N-term H or Acetyl
  MOD_RES (7)..(7): Modified Cys
  MOD_RES (9)..(9): Thr or Phospho-Thr
  See specification as filed for detailed description of substitutions and preferred embodiments
RLPWWRCYTLQVARQGNTKQR

SEQ ID NO: 4562 - protein, 21 aa, Artificial Sequence
  Description of Artificial Sequence: Synthetic peptide
  N-term H or Acetyl
  MOD_RES (7)..(7): Modified Cys
  MOD_RES (9)..(9): Thr or Phospho-Thr
  See specification as filed for detailed description of substitutions and preferred embodiments
RLPWWRCYTLQVARQVNTKQR

SEQ ID NO: 4563 - protein, 21 aa, Artificial Sequence
  Description of Artificial Sequence: Synthetic peptide
  N-term H or Acetyl
  MOD_RES (7)..(7): Modified Cys
  MOD_RES (9)..(9): Thr or Phospho-Thr
  See specification as filed for detailed description of substitutions and preferred embodiments
RLPWWRCYTLQVERDGNTKQR

SEQ ID NO: 4564 - protein, 21 aa, Artificial Sequence
  Description of Artificial Sequence: Synthetic peptide
  N-term H or Acetyl
  MOD_RES (7)..(7): Modified Cys
  MOD_RES (9)..(9): Thr or Phospho-Thr
  See specification as filed for detailed description of substitutions and preferred embodiments
RLPWWRCYTLQVERDVNTKQR

SEQ ID NO: 4565 - protein, 21 aa, Artificial Sequence
  Description of Artificial Sequence: Synthetic peptide
  N-term H or Acetyl
  MOD_RES (7)..(7): Modified Cys
  MOD_RES (9)..(9): Thr or Phospho-Thr
  See specification as filed for detailed description of substitutions and preferred embodiments
RLPWWRCYTLQVEREGNTKQR

SEQ ID NO: 4566 - protein, 21 aa, Artificial Sequence
  Description of Artificial Sequence: Synthetic peptide
  N-term H or Acetyl
  MOD_RES (7)..(7): Modified Cys
  MOD_RES (9)..(9): Thr or Phospho-Thr
  See specification as filed for detailed description of substitutions and preferred embodiments
RLPWWRCYTLQVEREVNTKQR

SEQ ID NO: 4567 - protein, 21 aa, Artificial Sequence
  Description of Artificial Sequence: Synthetic peptide
  N-term H or Acetyl
  MOD_RES (7)..(7): Modified Cys
  MOD_RES (9)..(9): Thr or Phospho-Thr
  See specification as filed for detailed description of substitutions and preferred embodiments
RLPWWRCYTLQVERQGNTKQR

SEQ ID NO: 4568 - protein, 21 aa, Artificial Sequence
  Description of Artificial Sequence: Synthetic peptide
  N-term H or Acetyl
  MOD_RES (7)..(7): Modified Cys
  MOD_RES (9)..(9): Thr or Phospho-Thr
  See specification as filed for detailed description of substitutions and preferred embodiments
RLPWWRCYTLQVERQVNTKQR

SEQ ID NO: 4569 - protein, 21 aa, Artificial Sequence
  Description of Artificial Sequence: Synthetic peptide
  N-term H or Acetyl
  MOD_RES (7)..(7): Modified Cys
  MOD_RES (9)..(9): Thr or Phospho-Thr
  See specification as filed for detailed description of substitutions and preferred embodiments
RLPWWRCYTLRRARDGNTKQR

SEQ ID NO: 4570 - protein, 21 aa, Artificial Sequence
  Description of Artificial Sequence: Synthetic peptide
  N-term H or Acetyl
  MOD_RES (7)..(7): Modified Cys
  MOD_RES (9)..(9): Thr or Phospho-Thr
  See specification as filed for detailed description of substitutions and preferred embodiments
RLPWWRCYTLRRARDVNTKQR

SEQ ID NO: 4571 - protein, 21 aa, Artificial Sequence
  Description of Artificial Sequence: Synthetic peptide
  N-term H or Acetyl
  MOD_RES (7)..(7): Modified Cys
  MOD_RES (9)..(9): Thr or Phospho-Thr
  See specification as filed for detailed description of substitutions and preferred embodiments
RLPWWRCYTLRRAREGNTKQR

SEQ ID NO: 4572 - protein, 21 aa, Artificial Sequence
  Description of Artificial Sequence: Synthetic peptide
  N-term H or Acetyl
  MOD_RES (7)..(7): Modified Cys
  MOD_RES (9)..(9): Thr or Phospho-Thr
  See specification as filed for detailed description of substitutions and preferred embodiments
RLPWWRCYTLRRAREVNTKQR

SEQ ID NO: 4573 - protein, 21 aa, Artificial Sequence
  Description of Artificial Sequence: Synthetic peptide
  N-term H or Acetyl
  MOD_RES (7)..(7): Modified Cys
  MOD_RES (9)..(9): Thr or Phospho-Thr
  See specification as filed for detailed description of substitutions and preferred embodiments
RLPWWRCYTLRRARQGNTKQR

SEQ ID NO: 4574 - protein, 21 aa, Artificial Sequence
  Description of Artificial Sequence: Synthetic peptide
  N-term H or Acetyl
  MOD_RES (7)..(7): Modified Cys
  MOD_RES (9)..(9): Thr or Phospho-Thr
  See specification as filed for detailed description of substitutions and preferred embodiments
RLPWWRCYTLRRARQVNTKQR

SEQ ID NO: 4575 - protein, 21 aa, Artificial Sequence
  Description of Artificial Sequence: Synthetic peptide
  N-term H or Acetyl
  MOD_RES (7)..(7): Modified Cys
  MOD_RES (9)..(9): Thr or Phospho-Thr
  See specification as filed for detailed description of substitutions and preferred embodiments
RLPWWRCYTLRRERDGNTKQR

SEQ ID NO: 4576 - protein, 21 aa, Artificial Sequence
  Description of Artificial Sequence: Synthetic peptide
  N-term H or Acetyl
  MOD_RES (7)..(7): Modified Cys
  MOD_RES (9)..(9): Thr or Phospho-Thr
  See specification as filed for detailed description of substitutions and preferred embodiments
RLPWWRCYTLRRERDVNTKQR

SEQ ID NO: 4577 - protein, 21 aa, Artificial Sequence
  Description of Artificial Sequence: Synthetic peptide
  N-term H or Acetyl
  MOD_RES (7)..(7): Modified Cys
  MOD_RES (9)..(9): Thr or Phospho-Thr
  See specification as filed for detailed description of substitutions and preferred embodiments
RLPWWRCYTLRREREGNTKQR

SEQ ID NO: 4578 - protein, 21 aa, Artificial Sequence
  Description of Artificial Sequence: Synthetic peptide
  N-term H or Acetyl
  MOD_RES (7)..(7): Modified Cys
  MOD_RES (9)..(9): Thr or Phospho-Thr
  See specification as filed for detailed description of substitutions and preferred embodiments
RLPWWRCYTLRREREVNTKQR

SEQ ID NO: 4579 - protein, 21 aa, Artificial Sequence
  Description of Artificial Sequence: Synthetic peptide
  N-term H or Acetyl
  MOD_RES (7)..(7): Modified Cys
  MOD_RES (9)..(9): Thr or Phospho-Thr
  See specification as filed for detailed description of substitutions and preferred embodiments
RLPWWRCYTLRRERQGNTKQR

SEQ ID NO: 4580 - protein, 21 aa, Artificial Sequence
  Description of Artificial Sequence: Synthetic peptide
  N-term H or Acetyl
  MOD_RES (7)..(7): Modified Cys
  MOD_RES (9)..(9): Thr or Phospho-Thr
  See specification as filed for detailed description of substitutions and preferred embodiments
RLPWWRCYTLRRERQVNTKQR

SEQ ID NO: 4581 - protein, 21 aa, Artificial Sequence
  Description of Artificial Sequence: Synthetic peptide
  N-term H or Acetyl
  MOD_RES (7)..(7): Modified Cys
  MOD_RES (9)..(9): Thr or Phospho-Thr
  See specification as filed for detailed description of substitutions and preferred embodiments
RLPWWRCYTLRVARDGNTKQR

SEQ ID NO: 4582 - protein, 21 aa, Artificial Sequence
  Description of Artificial Sequence: Synthetic peptide
  N-term H or Acetyl
  MOD_RES (7)..(7): Modified Cys
  MOD_RES (9)..(9): Thr or Phospho-Thr
  See specification as filed for detailed description of substitutions and preferred embodiments
RLPWWRCYTLRVARDVNTKQR

SEQ ID NO: 4583 - protein, 21 aa, Artificial Sequence
  Description of Artificial Sequence: Synthetic peptide
  N-term H or Acetyl
  MOD_RES (7)..(7): Modified Cys
  MOD_RES (9)..(9): Thr or Phospho-Thr
  See specification as filed for detailed description of substitutions and preferred embodiments
RLPWWRCYTLRVAREGNTKQR

SEQ ID NO: 4584 - protein, 21 aa, Artificial Sequence
  Description of Artificial Sequence: Synthetic peptide
  N-term H or Acetyl
  MOD_RES (7)..(7): Modified Cys
  MOD_RES (9)..(9): Thr or Phospho-Thr
  See specification as filed for detailed description of substitutions and preferred embodiments
RLPWWRCYTLRVAREVNTKQR

SEQ ID NO: 4585 - protein, 21 aa, Artificial Sequence
  Description of Artificial Sequence: Synthetic peptide
  N-term H or Acetyl
  MOD_RES (7)..(7): Modified Cys
  MOD_RES (9)..(9): Thr or Phospho-Thr
  See specification as filed for detailed description of substitutions and preferred embodiments
RLPWWRCYTLRVARQGNTKQR

SEQ ID NO: 4586 - protein, 21 aa, Artificial Sequence
  Description of Artificial Sequence: Synthetic peptide
  N-term H or Acetyl
  MOD_RES (7)..(7): Modified Cys
  MOD_RES (9)..(9): Thr or Phospho-Thr
  See specification as filed for detailed description of substitutions and preferred embodiments
RLPWWRCYTLRVARQVNTKQR

SEQ ID NO: 4587 - protein, 21 aa, Artificial Sequence
  Description of Artificial Sequence: Synthetic peptide
  N-term H or Acetyl
  MOD_RES (7)..(7): Modified Cys
  MOD_RES (9)..(9): Thr or Phospho-Thr
  See specification as filed for detailed description of substitutions and preferred embodiments
RLPWWRCYTLRVERDGNTKQR

SEQ ID NO: 4588 - protein, 21 aa, Artificial Sequence
  Description of Artificial Sequence: Synthetic peptide
  N-term H or Acetyl
  MOD_RES (7)..(7): Modified Cys
  MOD_RES (9)..(9): Thr or Phospho-Thr
  See specification as filed for detailed description of substitutions and preferred embodiments
RLPWWRCYTLRVERDVNTKQR

SEQ ID NO: 4589 - protein, 21 aa, Artificial Sequence
  Description of Artificial Sequence: Synthetic peptide
  N-term H or Acetyl
  MOD_RES (7)..(7): Modified Cys
  MOD_RES (9)..(9): Thr or Phospho-Thr
  See specification as filed for detailed description of substitutions and preferred embodiments
RLPWWRCYTLRVEREGNTKQR

SEQ ID NO: 4590 - protein, 21 aa, Artificial Sequence
  Description of Artificial Sequence: Synthetic peptide
  N-term H or Acetyl
  MOD_RES (7)..(7): Modified Cys
  MOD_RES (9)..(9): Thr or Phospho-Thr
  See specification as filed for detailed description of substitutions and preferred embodiments
RLPWWRCYTLRVEREVNTKQR

SEQ ID NO: 4591 - protein, 21 aa, Artificial Sequence
  Description of Artificial Sequence: Synthetic peptide
  N-term H or Acetyl
  MOD_RES (7)..(7): Modified Cys
  MOD_RES (9)..(9): Thr or Phospho-Thr
  See specification as filed for detailed description of substitutions and preferred embodiments
RLPWWRCYTLRVERQGNTKQR

SEQ ID NO: 4592 - protein, 21 aa, Artificial Sequence
  Description of Artificial Sequence: Synthetic peptide
  N-term H or Acetyl
  MOD_RES (7)..(7): Modified Cys
  MOD_RES (9)..(9): Thr or Phospho-Thr
  See specification as filed for detailed description of substitutions and preferred embodiments
RLPWWRCYTLRVERQVNTKQR

SEQ ID NO: 4593 - protein, 21 aa, Artificial Sequence
  Description of Artificial Sequence: Synthetic peptide
  N-term H or Acetyl
  MOD_RES (7)..(7): Modified Cys
  MOD_RES (9)..(9): Thr or Phospho-Thr
  See specification as filed for detailed description of substitutions and preferred embodiments
RLPWWRCYTLVRARDGNTKQR

SEQ ID NO: 4594 - protein, 21 aa, Artificial Sequence
  Description of Artificial Sequence: Synthetic peptide
  N-term H or Acetyl
  MOD_RES (7)..(7): Modified Cys
  MOD_RES (9)..(9): Thr or Phospho-Thr
  See specification as filed for detailed description of substitutions and preferred embodiments
RLPWWRCYTLVRARDVNTKQR

SEQ ID NO: 4595 - protein, 21 aa, Artificial Sequence
  Description of Artificial Sequence: Synthetic peptide
  N-term H or Acetyl
  MOD_RES (7)..(7): Modified Cys
  MOD_RES (9)..(9): Thr or Phospho-Thr
  See specification as filed for detailed description of substitutions and preferred embodiments
RLPWWRCYTLVRAREGNTKQR

SEQ ID NO: 4596 - protein, 21 aa, Artificial Sequence
  Description of Artificial Sequence: Synthetic peptide
  N-term H or Acetyl
  MOD_RES (7)..(7): Modified Cys
  MOD_RES (9)..(9): Thr or Phospho-Thr
  See specification as filed for detailed description of substitutions and preferred embodiments
RLPWWRCYTLVRAREVNTKQR

SEQ ID NO: 4597 - protein, 21 aa, Artificial Sequence
  Description of Artificial Sequence: Synthetic peptide
  N-term H or Acetyl
  MOD_RES (7)..(7): Modified Cys
  MOD_RES (9)..(9): Thr or Phospho-Thr
  See specification as filed for detailed description of substitutions and preferred embodiments
RLPWWRCYTLVRARQGNTKQR

SEQ ID NO: 4598 - protein, 21 aa, Artificial Sequence
  Description of Artificial Sequence: Synthetic peptide
  N-term H or Acetyl
  MOD_RES (7)..(7): Modified Cys
  MOD_RES (9)..(9): Thr or Phospho-Thr
  See specification as filed for detailed description of substitutions and preferred embodiments
RLPWWRCYTLVRARQVNTKQR

SEQ ID NO: 4599 - protein, 21 aa, Artificial Sequence
  Description of Artificial Sequence: Synthetic peptide
  N-term H or Acetyl
  MOD_RES (7)..(7): Modified Cys
  MOD_RES (9)..(9): Thr or Phospho-Thr
  See specification as filed for detailed description of substitutions and preferred embodiments
RLPWWRCYTLVRERDGNTKQR

SEQ ID NO: 4600 - protein, 21 aa, Artificial Sequence
  Description of Artificial Sequence: Synthetic peptide
  N-term H or Acetyl
  MOD_RES (7)..(7): Modified Cys
  MOD_RES (9)..(9): Thr or Phospho-Thr
  See specification as filed for detailed description of substitutions and preferred embodiments
RLPWWRCYTLVRERDVNTKQR

SEQ ID NO: 4601 - protein, 21 aa, Artificial Sequence
  Description of Artificial Sequence: Synthetic peptide
  N-term H or Acetyl
  MOD_RES (7)..(7): Modified Cys
  MOD_RES (9)..(9): Thr or Phospho-Thr
  See specification as filed for detailed description of substitutions and preferred embodiments
RLPWWRCYTLVREREGNTKQR

SEQ ID NO: 4602 - protein, 21 aa, Artificial Sequence
  Description of Artificial Sequence: Synthetic peptide
  N-term H or Acetyl
  MOD_RES (7)..(7): Modified Cys
  MOD_RES (9)..(9): Thr or Phospho-Thr
  See specification as filed for detailed description of substitutions and preferred embodiments
RLPWWRCYTLVREREVNTKQR

SEQ ID NO: 4603 - protein, 21 aa, Artificial Sequence
  Description of Artificial Sequence: Synthetic peptide
  N-term H or Acetyl
  MOD_RES (7)..(7): Modified Cys
  MOD_RES (9)..(9): Thr or Phospho-Thr
  See specification as filed for detailed description of substitutions and preferred embodiments
RLPWWRCYTLVRERQGNTKQR

SEQ ID NO: 4604 - protein, 21 aa, Artificial Sequence
  Description of Artificial Sequence: Synthetic peptide
  N-term H or Acetyl
  MOD_RES (7)..(7): Modified Cys
  MOD_RES (9)..(9): Thr or Phospho-Thr
  See specification as filed for detailed description of substitutions and preferred embodiments
RLPWWRCYTLVRERQVNTKQR

SEQ ID NO: 4605 - protein, 21 aa, Artificial Sequence
  Description of Artificial Sequence: Synthetic peptide
  N-term H or Acetyl
  MOD_RES (7)..(7): Modified Cys
  MOD_RES (9)..(9): Thr or Phospho-Thr
  See specification as filed for detailed description of substitutions and preferred embodiments
RLPWWRCYTLVVARDGNTKQR

SEQ ID NO: 4606 - protein, 21 aa, Artificial Sequence
  Description of Artificial Sequence: Synthetic peptide
  N-term H or Acetyl
  MOD_RES (7)..(7): Modified Cys
  MOD_RES (9)..(9): Thr or Phospho-Thr
  See specification as filed for detailed description of substitutions and preferred embodiments
RLPWWRCYTLVVARDVNTKQR

SEQ ID NO: 4607 - protein, 21 aa, Artificial Sequence
  Description of Artificial Sequence: Synthetic peptide
  N-term H or Acetyl
  MOD_RES (7)..(7): Modified Cys
  MOD_RES (9)..(9): Thr or Phospho-Thr
  See specification as filed for detailed description of substitutions and preferred embodiments
RLPWWRCYTLVVAREGNTKQR

SEQ ID NO: 4608 - protein, 21 aa, Artificial Sequence
  Description of Artificial Sequence: Synthetic peptide
  N-term H or Acetyl
  MOD_RES (7)..(7): Modified Cys
  MOD_RES (9)..(9): Thr or Phospho-Thr
  See specification as filed for detailed description of substitutions and preferred embodiments
RLPWWRCYTLVVAREVNTKQR

SEQ ID NO: 4609 - protein, 21 aa, Artificial Sequence
  Description of Artificial Sequence: Synthetic peptide
  N-term H or Acetyl
  MOD_RES (7)..(7): Modified Cys
  MOD_RES (9)..(9): Thr or Phospho-Thr
  See specification as filed for detailed description of substitutions and preferred embodiments
RLPWWRCYTLVVARQGNTKQR

SEQ ID NO: 4610 - protein, 21 aa, Artificial Sequence
  Description of Artificial Sequence: Synthetic peptide
  N-term H or Acetyl
  MOD_RES (7)..(7): Modified Cys
  MOD_RES (9)..(9): Thr or Phospho-Thr
  See specification as filed for detailed description of substitutions and preferred embodiments
RLPWWRCYTLVVARQVNTKQR

SEQ ID NO: 4611 - protein, 21 aa, Artificial Sequence
  Description of Artificial Sequence: Synthetic peptide
  N-term H or Acetyl
  MOD_RES (7)..(7): Modified Cys
  MOD_RES (9)..(9): Thr or Phospho-Thr
  See specification as filed for detailed description of substitutions and preferred embodiments
RLPWWRCYTLVVERDGNTKQR

SEQ ID NO: 4612 - protein, 21 aa, Artificial Sequence
  Description of Artificial Sequence: Synthetic peptide
  N-term H or Acetyl
  MOD_RES (7)..(7): Modified Cys
  MOD_RES (9)..(9): Thr or Phospho-Thr
  See specification as filed for detailed description of substitutions and preferred embodiments
RLPWWRCYTLVVERDVNTKQR

SEQ ID NO: 4613 - protein, 21 aa, Artificial Sequence
  Description of Artificial Sequence: Synthetic peptide
  N-term H or Acetyl
  MOD_RES (7)..(7): Modified Cys
  MOD_RES (9)..(9): Thr or Phospho-Thr
  See specification as filed for detailed description of substitutions and preferred embodiments
RLPWWRCYTLVVEREGNTKQR

SEQ ID NO: 4614 - protein, 21 aa, Artificial Sequence
  Description of Artificial Sequence: Synthetic peptide
  N-term H or Acetyl
  MOD_RES (7)..(7): Modified Cys
  MOD_RES (9)..(9): Thr or Phospho-Thr
  See specification as filed for detailed description of substitutions and preferred embodiments
RLPWWRCYTLVVEREVNTKQR

SEQ ID NO: 4615 - protein, 21 aa, Artificial Sequence
  Description of Artificial Sequence: Synthetic peptide
  N-term H or Acetyl
  MOD_RES (7)..(7): Modified Cys
  MOD_RES (9)..(9): Thr or Phospho-Thr
  See specification as filed for detailed description of substitutions and preferred embodiments
RLPWWRCYTLVVERQGNTKQR

SEQ ID NO: 4616 - protein, 21 aa, Artificial Sequence
  Description of Artificial Sequence: Synthetic peptide
  N-term H or Acetyl
  MOD_RES (7)..(7): Modified Cys
  MOD_RES (9)..(9): Thr or Phospho-Thr
  See specification as filed for detailed description of substitutions and preferred embodiments
RLPWWRCYTLVVERQVNTKQR

SEQ ID NO: 4617 - protein, 21 aa, Artificial Sequence
  Description of Artificial Sequence: Synthetic peptide
  N-term H or Acetyl
  MOD_RES (7)..(7): Modified Cys
  MOD_RES (9)..(9): Thr or Phospho-Thr
  See specification as filed for detailed description of substitutions and preferred embodiments
RLPWWRCYTWQRARDGNTKQR

SEQ ID NO: 4618 - protein, 21 aa, Artificial Sequence
  Description of Artificial Sequence: Synthetic peptide
  N-term H or Acetyl
  MOD_RES (7)..(7): Modified Cys
  MOD_RES (9)..(9): Thr or Phospho-Thr
  See specification as filed for detailed description of substitutions and preferred embodiments
RLPWWRCYTWQRARDVNTKQR

SEQ ID NO: 4619 - protein, 21 aa, Artificial Sequence
  Description of Artificial Sequence: Synthetic peptide
  N-term H or Acetyl
  MOD_RES (7)..(7): Modified Cys
  MOD_RES (9)..(9): Thr or Phospho-Thr
  See specification as filed for detailed description of substitutions and preferred embodiments
RLPWWRCYTWQRAREGNTKQR

SEQ ID NO: 4620 - protein, 21 aa, Artificial Sequence
  Description of Artificial Sequence: Synthetic peptide
  N-term H or Acetyl
  MOD_RES (7)..(7): Modified Cys
  MOD_RES (9)..(9): Thr or Phospho-Thr
  See specification as filed for detailed description of substitutions and preferred embodiments
RLPWWRCYTWQRAREVNTKQR

SEQ ID NO: 4621 - protein, 21 aa, Artificial Sequence
  Description of Artificial Sequence: Synthetic peptide
  N-term H or Acetyl
  MOD_RES (7)..(7): Modified Cys
  MOD_RES (9)..(9): Thr or Phospho-Thr
  See specification as filed for detailed description of substitutions and preferred embodiments
RLPWWRCYTWQRARQGNTKQR

SEQ ID NO: 4622 - protein, 21 aa, Artificial Sequence
  Description of Artificial Sequence: Synthetic peptide
  N-term H or Acetyl
  MOD_RES (7)..(7): Modified Cys
  MOD_RES (9)..(9): Thr or Phospho-Thr
  See specification as filed for detailed description of substitutions and preferred embodiments
RLPWWRCYTWQRARQVNTKQR

SEQ ID NO: 4623 - protein, 21 aa, Artificial Sequence
  Description of Artificial Sequence: Synthetic peptide
  N-term H or Acetyl
  MOD_RES (7)..(7): Modified Cys
  MOD_RES (9)..(9): Thr or Phospho-Thr
  See specification as filed for detailed description of substitutions and preferred embodiments
RLPWWRCYTWQRERDGNTKQR

SEQ ID NO: 4624 - protein, 21 aa, Artificial Sequence
  Description of Artificial Sequence: Synthetic peptide
  N-term H or Acetyl
  MOD_RES (7)..(7): Modified Cys
  MOD_RES (9)..(9): Thr or Phospho-Thr
  See specification as filed for detailed description of substitutions and preferred embodiments
RLPWWRCYTWQRERDVNTKQR

SEQ ID NO: 4625 - protein, 21 aa, Artificial Sequence
  Description of Artificial Sequence: Synthetic peptide
  N-term H or Acetyl
  MOD_RES (7)..(7): Modified Cys
  MOD_RES (9)..(9): Thr or Phospho-Thr
  See specification as filed for detailed description of substitutions and preferred embodiments
RLPWWRCYTWQREREGNTKQR

SEQ ID NO: 4626 - protein, 21 aa, Artificial Sequence
  Description of Artificial Sequence: Synthetic peptide
  N-term H or Acetyl
  MOD_RES (7)..(7): Modified Cys
  MOD_RES (9)..(9): Thr or Phospho-Thr
  See specification as filed for detailed description of substitutions and preferred embodiments
RLPWWRCYTWQREREVNTKQR

SEQ ID NO: 4627 - protein, 21 aa, Artificial Sequence
  Description of Artificial Sequence: Synthetic peptide
  N-term H or Acetyl
  MOD_RES (7)..(7): Modified Cys
  MOD_RES (9)..(9): Thr or Phospho-Thr
  See specification as filed for detailed description of substitutions and preferred embodiments
RLPWWRCYTWQRERQGNTKQR

SEQ ID NO: 4628 - protein, 21 aa, Artificial Sequence
  Description of Artificial Sequence: Synthetic peptide
  N-term H or Acetyl
  MOD_RES (7)..(7): Modified Cys
  MOD_RES (9)..(9): Thr or Phospho-Thr
  See specification as filed for detailed description of substitutions and preferred embodiments
RLPWWRCYTWQRERQVNTKQR

SEQ ID NO: 4629 - protein, 21 aa, Artificial Sequence
  Description of Artificial Sequence: Synthetic peptide
  N-term H or Acetyl
  MOD_RES (7)..(7): Modified Cys
  MOD_RES (9)..(9): Thr or Phospho-Thr
  See specification as filed for detailed description of substitutions and preferred embodiments
RLPWWRCYTWQVARDGNTKQR

SEQ ID NO: 4630 - protein, 21 aa, Artificial Sequence
  Description of Artificial Sequence: Synthetic peptide
  N-term H or Acetyl
  MOD_RES (7)..(7): Modified Cys
  MOD_RES (9)..(9): Thr or Phospho-Thr
  See specification as filed for detailed description of substitutions and preferred embodiments
RLPWWRCYTWQVARDVNTKQR

SEQ ID NO: 4631 - protein, 21 aa, Artificial Sequence
  Description of Artificial Sequence: Synthetic peptide
  N-term H or Acetyl
  MOD_RES (7)..(7): Modified Cys
  MOD_RES (9)..(9): Thr or Phospho-Thr
  See specification as filed for detailed description of substitutions and preferred embodiments
RLPWWRCYTWQVAREGNTKQR

SEQ ID NO: 4632 - protein, 21 aa, Artificial Sequence
  Description of Artificial Sequence: Synthetic peptide
  N-term H or Acetyl
  MOD_RES (7)..(7): Modified Cys
  MOD_RES (9)..(9): Thr or Phospho-Thr
  See specification as filed for detailed description of substitutions and preferred embodiments
RLPWWRCYTWQVAREVNTKQR

SEQ ID NO: 4633 - protein, 21 aa, Artificial Sequence
  Description of Artificial Sequence: Synthetic peptide
  N-term H or Acetyl
  MOD_RES (7)..(7): Modified Cys
  MOD_RES (9)..(9): Thr or Phospho-Thr
  See specification as filed for detailed description of substitutions and preferred embodiments
RLPWWRCYTWQVARQGNTKQR

SEQ ID NO: 4634 - protein, 21 aa, Artificial Sequence
  Description of Artificial Sequence: Synthetic peptide
  N-term H or Acetyl
  MOD_RES (7)..(7): Modified Cys
  MOD_RES (9)..(9): Thr or Phospho-Thr
  See specification as filed for detailed description of substitutions and preferred embodiments
RLPWWRCYTWQVARQVNTKQR

SEQ ID NO: 4635 - protein, 21 aa, Artificial Sequence
  Description of Artificial Sequence: Synthetic peptide
  N-term H or Acetyl
  MOD_RES (7)..(7): Modified Cys
  MOD_RES (9)..(9): Thr or Phospho-Thr
  See specification as filed for detailed description of substitutions and preferred embodiments
RLPWWRCYTWQVERDGNTKQR

SEQ ID NO: 4636 - protein, 21 aa, Artificial Sequence
  Description of Artificial Sequence: Synthetic peptide
  N-term H or Acetyl
  MOD_RES (7)..(7): Modified Cys
  MOD_RES (9)..(9): Thr or Phospho-Thr
  See specification as filed for detailed description of substitutions and preferred embodiments
RLPWWRCYTWQVERDVNTKQR

SEQ ID NO: 4637 - protein, 21 aa, Artificial Sequence
  Description of Artificial Sequence: Synthetic peptide
  N-term H or Acetyl
  MOD_RES (7)..(7): Modified Cys
  MOD_RES (9)..(9): Thr or Phospho-Thr
  See specification as filed for detailed description of substitutions and preferred embodiments
RLPWWRCYTWQVEREGNTKQR

SEQ ID NO: 4638 - protein, 21 aa, Artificial Sequence
  Description of Artificial Sequence: Synthetic peptide
  N-term H or Acetyl
  MOD_RES (7)..(7): Modified Cys
  MOD_RES (9)..(9): Thr or Phospho-Thr
  See specification as filed for detailed description of substitutions and preferred embodiments
RLPWWRCYTWQVEREVNTKQR

SEQ ID NO: 4639 - protein, 21 aa, Artificial Sequence
  Description of Artificial Sequence: Synthetic peptide
  N-term H or Acetyl
  MOD_RES (7)..(7): Modified Cys
  MOD_RES (9)..(9): Thr or Phospho-Thr
  See specification as filed for detailed description of substitutions and preferred embodiments
RLPWWRCYTWQVERQGNTKQR

SEQ ID NO: 4640 - protein, 21 aa, Artificial Sequence
  Description of Artificial Sequence: Synthetic peptide
  N-term H or Acetyl
  MOD_RES (7)..(7): Modified Cys
  MOD_RES (9)..(9): Thr or Phospho-Thr
  See specification as filed for detailed description of substitutions and preferred embodiments
RLPWWRCYTWQVERQVNTKQR

SEQ ID NO: 4641 - protein, 21 aa, Artificial Sequence
  Description of Artificial Sequence: Synthetic peptide
  N-term H or Acetyl
  MOD_RES (7)..(7): Modified Cys
  MOD_RES (9)..(9): Thr or Phospho-Thr
  See specification as filed for detailed description of substitutions and preferred embodiments
RLPWWRCYTWRRARDGNTKQR

SEQ ID NO: 4642 - protein, 21 aa, Artificial Sequence
  Description of Artificial Sequence: Synthetic peptide
  N-term H or Acetyl
  MOD_RES (7)..(7): Modified Cys
  MOD_RES (9)..(9): Thr or Phospho-Thr
  See specification as filed for detailed description of substitutions and preferred embodiments
RLPWWRCYTWRRARDVNTKQR

SEQ ID NO: 4643 - protein, 21 aa, Artificial Sequence
  Description of Artificial Sequence: Synthetic peptide
  N-term H or Acetyl
  MOD_RES (7)..(7): Modified Cys
  MOD_RES (9)..(9): Thr or Phospho-Thr
  See specification as filed for detailed description of substitutions and preferred embodiments
RLPWWRCYTWRRAREGNTKQR

SEQ ID NO: 4644 - protein, 21 aa, Artificial Sequence
  Description of Artificial Sequence: Synthetic peptide
  N-term H or Acetyl
  MOD_RES (7)..(7): Modified Cys
  MOD_RES (9)..(9): Thr or Phospho-Thr
  See specification as filed for detailed description of substitutions and preferred embodiments
RLPWWRCYTWRRAREVNTKQR

SEQ ID NO: 4645 - protein, 21 aa, Artificial Sequence
  Description of Artificial Sequence: Synthetic peptide
  N-term H or Acetyl
  MOD_RES (7)..(7): Modified Cys
  MOD_RES (9)..(9): Thr or Phospho-Thr
  See specification as filed for detailed description of substitutions and preferred embodiments
RLPWWRCYTWRRARQGNTKQR

SEQ ID NO: 4646 - protein, 21 aa, Artificial Sequence
  Description of Artificial Sequence: Synthetic peptide
  N-term H or Acetyl
  MOD_RES (7)..(7): Modified Cys
  MOD_RES (9)..(9): Thr or Phospho-Thr
  See specification as filed for detailed description of substitutions and preferred embodiments
RLPWWRCYTWRRARQVNTKQR

SEQ ID NO: 4647 - protein, 21 aa, Artificial Sequence
  Description of Artificial Sequence: Synthetic peptide
  N-term H or Acetyl
  MOD_RES (7)..(7): Modified Cys
  MOD_RES (9)..(9): Thr or Phospho-Thr
  See specification as filed for detailed description of substitutions and preferred embodiments
RLPWWRCYTWRRERDGNTKQR

SEQ ID NO: 4648 - protein, 21 aa, Artificial Sequence
  Description of Artificial Sequence: Synthetic peptide
  N-term H or Acetyl
  MOD_RES (7)..(7): Modified Cys
  MOD_RES (9)..(9): Thr or Phospho-Thr
  See specification as filed for detailed description of substitutions and preferred embodiments
RLPWWRCYTWRRERDVNTKQR

SEQ ID NO: 4649 - protein, 21 aa, Artificial Sequence
  Description of Artificial Sequence: Synthetic peptide
  N-term H or Acetyl
  MOD_RES (7)..(7): Modified Cys
  MOD_RES (9)..(9): Thr or Phospho-Thr
  See specification as filed for detailed description of substitutions and preferred embodiments
RLPWWRCYTWRREREGNTKQR

SEQ ID NO: 4650 - protein, 21 aa, Artificial Sequence
  Description of Artificial Sequence: Synthetic peptide
  N-term H or Acetyl
  MOD_RES (7)..(7): Modified Cys
  MOD_RES (9)..(9): Thr or Phospho-Thr
  See specification as filed for detailed description of substitutions and preferred embodiments
RLPWWRCYTWRREREVNTKQR

SEQ ID NO: 4651 - protein, 21 aa, Artificial Sequence
  Description of Artificial Sequence: Synthetic peptide
  N-term H or Acetyl
  MOD_RES (7)..(7): Modified Cys
  MOD_RES (9)..(9): Thr or Phospho-Thr
  See specification as filed for detailed description of substitutions and preferred embodiments
RLPWWRCYTWRRERQGNTKQR

SEQ ID NO: 4652 - protein, 21 aa, Artificial Sequence
  Description of Artificial Sequence: Synthetic peptide
  N-term H or Acetyl
  MOD_RES (7)..(7): Modified Cys
  MOD_RES (9)..(9): Thr or Phospho-Thr
  See specification as filed for detailed description of substitutions and preferred embodiments
RLPWWRCYTWRRERQVNTKQR

SEQ ID NO: 4653 - protein, 21 aa, Artificial Sequence
  Description of Artificial Sequence: Synthetic peptide
  N-term H or Acetyl
  MOD_RES (7)..(7): Modified Cys
  MOD_RES (9)..(9): Thr or Phospho-Thr
  See specification as filed for detailed description of substitutions and preferred embodiments
RLPWWRCYTWRVARDGNTKQR

SEQ ID NO: 4654 - protein, 21 aa, Artificial Sequence
  Description of Artificial Sequence: Synthetic peptide
  N-term H or Acetyl
  MOD_RES (7)..(7): Modified Cys
  MOD_RES (9)..(9): Thr or Phospho-Thr
  See specification as filed for detailed description of substitutions and preferred embodiments
RLPWWRCYTWRVARDVNTKQR

SEQ ID NO: 4655 - protein, 21 aa, Artificial Sequence
  Description of Artificial Sequence: Synthetic peptide
  N-term H or Acetyl
  MOD_RES (7)..(7): Modified Cys
  MOD_RES (9)..(9): Thr or Phospho-Thr
  See specification as filed for detailed description of substitutions and preferred embodiments
RLPWWRCYTWRVAREGNTKQR

SEQ ID NO: 4656 - protein, 21 aa, Artificial Sequence
  Description of Artificial Sequence: Synthetic peptide
  N-term H or Acetyl
  MOD_RES (7)..(7): Modified Cys
  MOD_RES (9)..(9): Thr or Phospho-Thr
  See specification as filed for detailed description of substitutions and preferred embodiments
RLPWWRCYTWRVAREVNTKQR

SEQ ID NO: 4657 - protein, 21 aa, Artificial Sequence
  Description of Artificial Sequence: Synthetic peptide
  N-term H or Acetyl
  MOD_RES (7)..(7): Modified Cys
  MOD_RES (9)..(9): Thr or Phospho-Thr
  See specification as filed for detailed description of substitutions and preferred embodiments
RLPWWRCYTWRVARQGNTKQR

SEQ ID NO: 4658 - protein, 21 aa, Artificial Sequence
  Description of Artificial Sequence: Synthetic peptide
  N-term H or Acetyl
  MOD_RES (7)..(7): Modified Cys
  MOD_RES (9)..(9): Thr or Phospho-Thr
  See specification as filed for detailed description of substitutions and preferred embodiments
RLPWWRCYTWRVARQVNTKQR

SEQ ID NO: 4659 - protein, 21 aa, Artificial Sequence
  Description of Artificial Sequence: Synthetic peptide
  N-term H or Acetyl
  MOD_RES (7)..(7): Modified Cys
  MOD_RES (9)..(9): Thr or Phospho-Thr
  See specification as filed for detailed description of substitutions and preferred embodiments
RLPWWRCYTWRVERDGNTKQR

SEQ ID NO: 4660 - protein, 21 aa, Artificial Sequence
  Description of Artificial Sequence: Synthetic peptide
  N-term H or Acetyl
  MOD_RES (7)..(7): Modified Cys
  MOD_RES (9)..(9): Thr or Phospho-Thr
  See specification as filed for detailed description of substitutions and preferred embodiments
RLPWWRCYTWRVERDVNTKQR

SEQ ID NO: 4661 - protein, 21 aa, Artificial Sequence
  Description of Artificial Sequence: Synthetic peptide
  N-term H or Acetyl
  MOD_RES (7)..(7): Modified Cys
  MOD_RES (9)..(9): Thr or Phospho-Thr
  See specification as filed for detailed description of substitutions and preferred embodiments
RLPWWRCYTWRVEREGNTKQR

SEQ ID NO: 4662 - protein, 21 aa, Artificial Sequence
  Description of Artificial Sequence: Synthetic peptide
  N-term H or Acetyl
  MOD_RES (7)..(7): Modified Cys
  MOD_RES (9)..(9): Thr or Phospho-Thr
  See specification as filed for detailed description of substitutions and preferred embodiments
RLPWWRCYTWRVEREVNTKQR

SEQ ID NO: 4663 - protein, 21 aa, Artificial Sequence
  Description of Artificial Sequence: Synthetic peptide
  N-term H or Acetyl
  MOD_RES (7)..(7): Modified Cys
  MOD_RES (9)..(9): Thr or Phospho-Thr
  See specification as filed for detailed description of substitutions and preferred embodiments
RLPWWRCYTWRVERQGNTKQR

SEQ ID NO: 4664 - protein, 21 aa, Artificial Sequence
  Description of Artificial Sequence: Synthetic peptide
  N-term H or Acetyl
  MOD_RES (7)..(7): Modified Cys
  MOD_RES (9)..(9): Thr or Phospho-Thr
  See specification as filed for detailed description of substitutions and preferred embodiments
RLPWWRCYTWRVERQVNTKQR

SEQ ID NO: 4665 - protein, 21 aa, Artificial Sequence
  Description of Artificial Sequence: Synthetic peptide
  N-term H or Acetyl
  MOD_RES (7)..(7): Modified Cys
  MOD_RES (9)..(9): Thr or Phospho-Thr
  See specification as filed for detailed description of substitutions and preferred embodiments
RLPWWRCYTWVRARDGNTKQR

SEQ ID NO: 4666 - protein, 21 aa, Artificial Sequence
  Description of Artificial Sequence: Synthetic peptide
  N-term H or Acetyl
  MOD_RES (7)..(7): Modified Cys
  MOD_RES (9)..(9): Thr or Phospho-Thr
  See specification as filed for detailed description of substitutions and preferred embodiments
RLPWWRCYTWVRARDVNTKQR

SEQ ID NO: 4667 - protein, 21 aa, Artificial Sequence
  Description of Artificial Sequence: Synthetic peptide
  N-term H or Acetyl
  MOD_RES (7)..(7): Modified Cys
  MOD_RES (9)..(9): Thr or Phospho-Thr
  See specification as filed for detailed description of substitutions and preferred embodiments
RLPWWRCYTWVRAREGNTKQR

SEQ ID NO: 4668 - protein, 21 aa, Artificial Sequence
  Description of Artificial Sequence: Synthetic peptide
  N-term H or Acetyl
  MOD_RES (7)..(7): Modified Cys
  MOD_RES (9)..(9): Thr or Phospho-Thr
  See specification as filed for detailed description of substitutions and preferred embodiments
RLPWWRCYTWVRAREVNTKQR

SEQ ID NO: 4669 - protein, 21 aa, Artificial Sequence
  Description of Artificial Sequence: Synthetic peptide
  N-term H or Acetyl
  MOD_RES (7)..(7): Modified Cys
  MOD_RES (9)..(9): Thr or Phospho-Thr
  See specification as filed for detailed description of substitutions and preferred embodiments
RLPWWRCYTWVRARQGNTKQR

SEQ ID NO: 4670 - protein, 21 aa, Artificial Sequence
  Description of Artificial Sequence: Synthetic peptide
  N-term H or Acetyl
  MOD_RES (7)..(7): Modified Cys
  MOD_RES (9)..(9): Thr or Phospho-Thr
  See specification as filed for detailed description of substitutions and preferred embodiments
RLPWWRCYTWVRARQVNTKQR

SEQ ID NO: 4671 - protein, 21 aa, Artificial Sequence
  Description of Artificial Sequence: Synthetic peptide
  N-term H or Acetyl
  MOD_RES (7)..(7): Modified Cys
  MOD_RES (9)..(9): Thr or Phospho-Thr
  See specification as filed for detailed description of substitutions and preferred embodiments
RLPWWRCYTWVRERDGNTKQR

SEQ ID NO: 4672 - protein, 21 aa, Artificial Sequence
  Description of Artificial Sequence: Synthetic peptide
  N-term H or Acetyl
  MOD_RES (7)..(7): Modified Cys
  MOD_RES (9)..(9): Thr or Phospho-Thr
  See specification as filed for detailed description of substitutions and preferred embodiments
RLPWWRCYTWVRERDVNTKQR

SEQ ID NO: 4673 - protein, 21 aa, Artificial Sequence
  Description of Artificial Sequence: Synthetic peptide
  N-term H or Acetyl
  MOD_RES (7)..(7): Modified Cys
  MOD_RES (9)..(9): Thr or Phospho-Thr
  See specification as filed for detailed description of substitutions and preferred embodiments
RLPWWRCYTWVREREGNTKQR

SEQ ID NO: 4674 - protein, 21 aa, Artificial Sequence
  Description of Artificial Sequence: Synthetic peptide
  N-term H or Acetyl
  MOD_RES (7)..(7): Modified Cys
  MOD_RES (9)..(9): Thr or Phospho-Thr
  See specification as filed for detailed description of substitutions and preferred embodiments
RLPWWRCYTWVREREVNTKQR

SEQ ID NO: 4675 - protein, 21 aa, Artificial Sequence
  Description of Artificial Sequence: Synthetic peptide
  N-term H or Acetyl
  MOD_RES (7)..(7): Modified Cys
  MOD_RES (9)..(9): Thr or Phospho-Thr
  See specification as filed for detailed description of substitutions and preferred embodiments
RLPWWRCYTWVRERQGNTKQR

SEQ ID NO: 4676 - protein, 21 aa, Artificial Sequence
  Description of Artificial Sequence: Synthetic peptide
  N-term H or Acetyl
  MOD_RES (7)..(7): Modified Cys
  MOD_RES (9)..(9): Thr or Phospho-Thr
  See specification as filed for detailed description of substitutions and preferred embodiments
RLPWWRCYTWVRERQVNTKQR

SEQ ID NO: 4677 - protein, 21 aa, Artificial Sequence
  Description of Artificial Sequence: Synthetic peptide
  N-term H or Acetyl
  MOD_RES (7)..(7): Modified Cys
  MOD_RES (9)..(9): Thr or Phospho-Thr
  See specification as filed for detailed description of substitutions and preferred embodiments
RLPWWRCYTWVVARDGNTKQR

SEQ ID NO: 4678 - protein, 21 aa, Artificial Sequence
  Description of Artificial Sequence: Synthetic peptide
  N-term H or Acetyl
  MOD_RES (7)..(7): Modified Cys
  MOD_RES (9)..(9): Thr or Phospho-Thr
  See specification as filed for detailed description of substitutions and preferred embodiments
RLPWWRCYTWVVARDVNTKQR

SEQ ID NO: 4679 - protein, 21 aa, Artificial Sequence
  Description of Artificial Sequence: Synthetic peptide
  N-term H or Acetyl
  MOD_RES (7)..(7): Modified Cys
  MOD_RES (9)..(9): Thr or Phospho-Thr
  See specification as filed for detailed description of substitutions and preferred embodiments
RLPWWRCYTWVVAREGNTKQR

SEQ ID NO: 4680 - protein, 21 aa, Artificial Sequence
  Description of Artificial Sequence: Synthetic peptide
  N-term H or Acetyl
  MOD_RES (7)..(7): Modified Cys
  MOD_RES (9)..(9): Thr or Phospho-Thr
  See specification as filed for detailed description of substitutions and preferred embodiments
RLPWWRCYTWVVAREVNTKQR

SEQ ID NO: 4681 - protein, 21 aa, Artificial Sequence
  Description of Artificial Sequence: Synthetic peptide
  N-term H or Acetyl
  MOD_RES (7)..(7): Modified Cys
  MOD_RES (9)..(9): Thr or Phospho-Thr
  See specification as filed for detailed description of substitutions and preferred embodiments
RLPWWRCYTWVVARQGNTKQR

SEQ ID NO: 4682 - protein, 21 aa, Artificial Sequence
  Description of Artificial Sequence: Synthetic peptide
  N-term H or Acetyl
  MOD_RES (7)..(7): Modified Cys
  MOD_RES (9)..(9): Thr or Phospho-Thr
  See specification as filed for detailed description of substitutions and preferred embodiments
RLPWWRCYTWVVARQVNTKQR

SEQ ID NO: 4683 - protein, 21 aa, Artificial Sequence
  Description of Artificial Sequence: Synthetic peptide
  N-term H or Acetyl
  MOD_RES (7)..(7): Modified Cys
  MOD_RES (9)..(9): Thr or Phospho-Thr
  See specification as filed for detailed description of substitutions and preferred embodiments
RLPWWRCYTWVVERDGNTKQR

SEQ ID NO: 4684 - protein, 21 aa, Artificial Sequence
  Description of Artificial Sequence: Synthetic peptide
  N-term H or Acetyl
  MOD_RES (7)..(7): Modified Cys
  MOD_RES (9)..(9): Thr or Phospho-Thr
  See specification as filed for detailed description of substitutions and preferred embodiments
RLPWWRCYTWVVERDVNTKQR

SEQ ID NO: 4685 - protein, 21 aa, Artificial Sequence
  Description of Artificial Sequence: Synthetic peptide
  N-term H or Acetyl
  MOD_RES (7)..(7): Modified Cys
  MOD_RES (9)..(9): Thr or Phospho-Thr
  See specification as filed for detailed description of substitutions and preferred embodiments
RLPWWRCYTWVVEREGNTKQR

SEQ ID NO: 4686 - protein, 21 aa, Artificial Sequence
  Description of Artificial Sequence: Synthetic peptide
  N-term H or Acetyl
  MOD_RES (7)..(7): Modified Cys
  MOD_RES (9)..(9): Thr or Phospho-Thr
  See specification as filed for detailed description of substitutions and preferred embodiments
RLPWWRCYTWVVEREVNTKQR

SEQ ID NO: 4687 - protein, 21 aa, Artificial Sequence
  Description of Artificial Sequence: Synthetic peptide
  N-term H or Acetyl
  MOD_RES (7)..(7): Modified Cys
  MOD_RES (9)..(9): Thr or Phospho-Thr
  See specification as filed for detailed description of substitutions and preferred embodiments
RLPWWRCYTWVVERQGNTKQR

SEQ ID NO: 4688 - protein, 21 aa, Artificial Sequence
  Description of Artificial Sequence: Synthetic peptide
  N-term H or Acetyl
  MOD_RES (7)..(7): Modified Cys
  MOD_RES (9)..(9): Thr or Phospho-Thr
  See specification as filed for detailed description of substitutions and preferred embodiments
RLPWWRCYTWVVERQVNTKQR

SEQ ID NO: 4689 - protein, 10 aa, Artificial Sequence
  Description of Artificial Sequence: Synthetic peptide
  N-term H or Acetyl
  MOD_RES (4)..(4): Modified Cys
  MOD_RES (6)..(6): Ser or Phospho-Ser
  See specification as filed for detailed description of substitutions and preferred embodiments
RLRCASFRRR

SEQ ID NO: 4690 - protein, 15 aa, Artificial Sequence
  Description of Artificial Sequence: Synthetic peptide
  N-term H or Acetyl
  MOD_RES (6)..(6): Modified Cys
  MOD_RES (8)..(8): Thr or Phospho-Thr
  See specification as filed for detailed description of substitutions and preferred embodiments
RNGKRCPTHTSRVGT

SEQ ID NO: 4691 - protein, 15 aa, Artificial Sequence
  Description of Artificial Sequence: Synthetic peptide
  N-term H or Acetyl
  MOD_RES (6)..(6): Thr or Phospho-Thr
  MOD_RES (8)..(8): Modified Cys
  See specification as filed for detailed description of substitutions and preferred embodiments
RNGKRTPCHTSRVGT

SEQ ID NO: 4692 - protein, 15 aa, Artificial Sequence
  Description of Artificial Sequence: Synthetic peptide
  N-term H or Acetyl
  MOD_RES (8)..(8): Modified Cys
  MOD_RES (10)..(10): Thr or Phospho-Thr
  See specification as filed for detailed description of substitutions and preferred embodiments
RNGKRTPCHTSRVGT

SEQ ID NO: 4693 - protein, 15 aa, Artificial Sequence
  Description of Artificial Sequence: Synthetic peptide
  N-term H or Acetyl
  MOD_RES (8)..(8): Thr or Phospho-Thr
  MOD_RES (10)..(10): Modified Cys
  See specification as filed for detailed description of substitutions and preferred embodiments
RNGKRTPTHCSRVGT

SEQ ID NO: 4694 - protein, 15 aa, Artificial Sequence
  Description of Artificial Sequence: Synthetic peptide
  N-term H or Acetyl
  MOD_RES (10)..(10): Thr or Phospho-Thr
  MOD_RES (12)..(12): Modified Cys
  See specification as filed for detailed description of substitutions and preferred embodiments
RNGKRTPTHTSCVGT

SEQ ID NO: 4695 - protein, 21 aa, Artificial Sequence
  Description of Artificial Sequence: Synthetic peptide
  N-term H or Acetyl
  MOD_RES (7)..(7): Modified Cys
  MOD_RES (9)..(9): Thr or Phospho-Thr
  See specification as filed for detailed description of substitutions and preferred embodiments
RNPWWRCYTWVVERDVNTKQR

SEQ ID NO: 4696 - protein, 10 aa, Artificial Sequence
  Description of Artificial Sequence: Synthetic peptide
  N-term H or Acetyl
  MOD_RES (4)..(4): Modified Cys
  MOD_RES (6)..(6): Ser or Phospho-Ser
  See specification as filed for detailed description of substitutions and preferred embodiments
RNRCASFRRR

SEQ ID NO: 4697 - protein, 20 aa, Artificial Sequence
  Description of Artificial Sequence: Synthetic peptide
  N-term H or Acetyl
  MOD_RES (8)..(8): Ser or Phospho-Ser
  MOD_RES (10)..(10): Modified Cys
  MOD_RES (16)..(16): Ser or Phospho-Ser
  See specification as filed for detailed description of substitutions and preferred embodiments
RPASVPPSPCLSRHSSHQRR

SEQ ID NO: 4698 - protein, 19 aa, Artificial Sequence
  Description of Artificial Sequence: Synthetic peptide
  N-term H or Acetyl
  MOD_RES (8)..(8): Ser or Phospho-Ser
  MOD_RES (10)..(10): Modified Cys
  MOD_RES (16)..(16): Ser or Phospho-Ser
  See specification as filed for detailed description of substitutions and preferred embodiments
RPASVPPSPCLSRHSSHQR

SEQ ID NO: 4699 - protein, 20 aa, Artificial Sequence
  Description of Artificial Sequence: Synthetic peptide
  N-term H or Acetyl
  MOD_RES (10)..(10): Modified Cys
  MOD_RES (12)..(12): Ser or Phospho-Ser
  MOD_RES (16)..(16): Ser or Phospho-Ser
  See specification as filed for detailed description of substitutions and preferred embodiments
RPASVPPSPCLSRHSSHQRR

SEQ ID NO: 4700 - protein, 19 aa, Artificial Sequence
  Description of Artificial Sequence: Synthetic peptide
  N-term H or Acetyl
  MOD_RES (10)..(10): Modified Cys
  MOD_RES (12)..(12): Ser or Phospho-Ser
  MOD_RES (16)..(16): Ser or Phospho-Ser
  See specification as filed for detailed description of substitutions and preferred embodiments
RPASVPPSPCLSRHSSHQR

SEQ ID NO: 4701 - protein, 15 aa, Artificial Sequence
  Description of Artificial Sequence: Synthetic peptide
  N-term H or Acetyl
  MOD_RES (6)..(6): Modified Cys
  MOD_RES (8)..(8): Ser or Phospho-Ser
  See specification as filed for detailed description of substitutions and preferred embodiments
RPHFPCFSYSASGTA

SEQ ID NO: 4702 - protein, 21 aa, Artificial Sequence
  Description of Artificial Sequence: Synthetic peptide
  N-term H or Acetyl
  MOD_RES (7)..(7): Modified Cys
  MOD_RES (9)..(9): Thr or Phospho-Thr
  See specification as filed for detailed description of substitutions and preferred embodiments
RPPWWRCYTWVVERDVNTKQR

SEQ ID NO: 4703 - protein, 10 aa, Artificial Sequence
  Description of Artificial Sequence: Synthetic peptide
  N-term H or Acetyl
  MOD_RES (4)..(4): Modified Cys
  MOD_RES (6)..(6): Ser or Phospho-Ser
  See specification as filed for detailed description of substitutions and preferred embodiments
RPRCASFRRR

SEQ ID NO: 4704 - protein, 21 aa, Artificial Sequence
  Description of Artificial Sequence: Synthetic peptide
  N-term H or Acetyl
  MOD_RES (7)..(7): Modified Cys
  MOD_RES (9)..(9): Thr or Phospho-Thr
  See specification as filed for detailed description of substitutions and preferred embodiments
RQPWWRCYTWVVERDVNTKQR

SEQ ID NO: 4705 - protein, 10 aa, Artificial Sequence
  Description of Artificial Sequence: Synthetic peptide
  N-term H or Acetyl
  MOD_RES (4)..(4): Modified Cys
  MOD_RES (6)..(6): Ser or Phospho-Ser
  See specification as filed for detailed description of substitutions and preferred embodiments
RQRCASFRRR

SEQ ID NO: 4706 - protein, 15 aa, Artificial Sequence
  Description of Artificial Sequence: Synthetic peptide
  N-term H or Acetyl
  MOD_RES (10)..(10): Ser or Phospho-Ser
  MOD_RES (12)..(12): Modified Cys
  See specification as filed for detailed description of substitutions and preferred embodiments
RQREGFGRQSMCEKR

SEQ ID NO: 4707 - protein, 10 aa, Artificial Sequence
  Description of Artificial Sequence: Synthetic peptide
  N-term H or Acetyl
  MOD_RES (3)..(3): Leu or Nle (i.e. isomer of Leucine)
  MOD_RES (4)..(4): Modified Cys
  MOD_RES (6)..(6): Ser or Phospho-Ser
  See specification as filed for detailed description of substitutions and preferred embodiments
RRLCASFRRR

SEQ ID NO: 4708 - protein, 10 aa, Artificial Sequence
  Description of Artificial Sequence: Synthetic peptide
  N-term H or Acetyl
  MOD_RES (4)..(4): Modified Cys
  MOD_RES (6)..(6): Ser or Phospho-Ser
  See specification as filed for detailed description of substitutions and preferred embodiments
RRACASFRRR

SEQ ID NO: 4709 - protein, 9 aa, Artificial Sequence
  Description of Artificial Sequence: Synthetic peptide
  N-term H or Acetyl
  MOD_RES (3)..(3): Modified Cys
  MOD_RES (5)..(5): Ser or Phospho-Ser
  See specification as filed for detailed description of substitutions and preferred embodiments
RRCASFRRR

SEQ ID NO: 4710 - protein, 8 aa, Artificial Sequence
  Description of Artificial Sequence: Synthetic peptide
  N-term H or Acetyl
  MOD_RES (3)..(3): Modified Cys
  MOD_RES (5)..(5): Ser or Phospho-Ser
  See specification as filed for detailed description of substitutions and preferred embodiments
RRCASFRR

SEQ ID NO: 4711 - protein, 7 aa, Artificial Sequence
  Description of Artificial Sequence: Synthetic peptide
  N-term H or Acetyl
  MOD_RES (3)..(3): Modified Cys
  MOD_RES (5)..(5): Ser or Phospho-Ser
  See specification as filed for detailed description of substitutions and preferred embodiments
RRCASFR

SEQ ID NO: 4712 - protein, 9 aa, Artificial Sequence
  Description of Artificial Sequence: Synthetic peptide
  N-term H or Acetyl
  MOD_RES (3)..(3): Modified Cys
  MOD_RES (5)..(5): Ser or Phospho-Ser
  See specification as filed for detailed description of substitutions and preferred embodiments
RRCLSFAEG

SEQ ID NO: 4713 - protein, 10 aa, Artificial Sequence
  Description of Artificial Sequence: Synthetic peptide
  N-term H or Acetyl
  MOD_RES (3)..(3): Modified Cys
  MOD_RES (5)..(5): Ser or Phospho-Ser
  See specification as filed for detailed description of substitutions and preferred embodiments
RRCLSFAEPG

SEQ ID NO: 4714 - protein, 10 aa, Artificial Sequence
  Description of Artificial Sequence: Synthetic peptide
  N-term H or Acetyl
  MOD_RES (4)..(4): Modified Cys
  MOD_RES (6)..(6): Ser or Phospho-Ser
  See specification as filed for detailed description of substitutions and preferred embodiments
RRDCASFRRR

SEQ ID NO: 4715 - protein, 10 aa, Artificial Sequence
  Description of Artificial Sequence: Synthetic peptide
  N-term H or Acetyl
  MOD_RES (4)..(4): Modified Cys
  MOD_RES (6)..(6): Ser or Phospho-Ser
  See specification as filed for detailed description of substitutions and preferred embodiments
RRECASFRRR

SEQ ID NO: 4716 - protein, 10 aa, Artificial Sequence
  Description of Artificial Sequence: Synthetic peptide
  N-term H or Acetyl
  MOD_RES (4)..(4): Modified Cys
  MOD_RES (6)..(6): Ser or Phospho-Ser
  See specification as filed for detailed description of substitutions and preferred embodiments
RRFCASFRRR

SEQ ID NO: 4717 - protein, 10 aa, Artificial Sequence
  Description of Artificial Sequence: Synthetic peptide
  N-term H or Acetyl
  MOD_RES (4)..(4): Modified Cys
  MOD_RES (6)..(6): Ser or Phospho-Ser
  See specification as filed for detailed description of substitutions and preferred embodiments
RRGCASFRRR

SEQ ID NO: 4718 - protein, 16 aa, Artificial Sequence
  Description of Artificial Sequence: Synthetic peptide
  N-term H or Acetyl
  MOD_RES (6)..(6): Modified Cys
  MOD_RES (8)..(8): Ser or Phospho-Ser
  See specification as filed for detailed description of substitutions and preferred embodiments
RRGGRCRSRSPDRRRR

SEQ ID NO: 4719 - protein, 16 aa, Artificial Sequence
  Description of Artificial Sequence: Synthetic peptide
  N-term H or Acetyl
  MOD_RES (8)..(8): Ser or Phospho-Ser
  MOD_RES (10)..(10): Modified Cys
  See specification as filed for detailed description of substitutions and preferred embodiments
RRGGRRRSRCPDRRRR

SEQ ID NO: 4720 - protein, 16 aa, Artificial Sequence
  Description of Artificial Sequence: Synthetic peptide
  N-term H or Acetyl
  MOD_RES (10)..(10): Ser or Phospho-Ser
  MOD_RES (12)..(12): Modified Cys
  See specification as filed for detailed description of substitutions and preferred embodiments
RRGGRRRSRSPCRRRR

SEQ ID NO: 4721 - protein, 10 aa, Artificial Sequence
  Description of Artificial Sequence: Synthetic peptide
  N-term H or Acetyl
  MOD_RES (4)..(4): Modified Cys
  MOD_RES (6)..(6): Ser or Phospho-Ser
  See specification as filed for detailed description of substitutions and preferred embodiments
RRHCASFRRR

SEQ ID NO: 4722 - protein, 24 aa, Artificial Sequence
  Description of Artificial Sequence: Synthetic peptide
  N-term H or Acetyl
  MOD_RES (6)..(6): Modified Cys
  MOD_RES (8)..(8): Thr or Phospho-Thr
  See specification as filed for detailed description of substitutions and preferred embodiments
RRHYYCDTHTNTYYLRTFGHNTRR

SEQ ID NO: 4723 - protein, 24 aa, Artificial Sequence
  Description of Artificial Sequence: Synthetic peptide
  N-term H or Acetyl
  MOD_RES (8)..(8): Thr or Phospho-Thr
  MOD_RES (10)..(10): Modified Cys
  See specification as filed for detailed description of substitutions and preferred embodiments
RRHYYYDTHCNTYYLRTFGHNTRR

SEQ ID NO: 4724 - protein, 24 aa, Artificial Sequence
  Description of Artificial Sequence: Synthetic peptide
  N-term H or Acetyl
  MOD_RES (10)..(10): Modified Cys
  MOD_RES (12)..(12): Thr or Phospho-Thr
  See specification as filed for detailed description of substitutions and preferred embodiments
RRHYYYDTHCNTYYLRTFGHNTRR

SEQ ID NO: 4725 - protein, 24 aa, Artificial Sequence
  Description of Artificial Sequence: Synthetic peptide
  N-term H or Acetyl
  MOD_RES (12)..(12): Thr or Phospho-Thr
  MOD_RES (14)..(14): Modified Cys
  See specification as filed for detailed description of substitutions and preferred embodiments
RRHYYYDTHTNTYCLRTFGHNTRR

SEQ ID NO: 4726 - protein, 24 aa, Artificial Sequence
  Description of Artificial Sequence: Synthetic peptide
  N-term H or Acetyl
  MOD_RES (15)..(15): Modified Cys
  MOD_RES (17)..(17): Thr or Phospho-Thr
  See specification as filed for detailed description of substitutions and preferred embodiments
RRHYYYDTHTNTYYCRTFGHNTRR

SEQ ID NO: 4727 - protein, 24 aa, Artificial Sequence
  Description of Artificial Sequence: Synthetic peptide
  N-term H or Acetyl
  MOD_RES (17)..(17): Thr or Phospho-Thr
  MOD_RES (19)..(19): Modified Cys
  See specification as filed for detailed description of substitutions and preferred embodiments
RRHYYYDTHTNTYYLRTFCHNTRR

SEQ ID NO: 4728 - protein, 10 aa, Artificial Sequence
  Description of Artificial Sequence: Synthetic peptide
  N-term H or Acetyl
  MOD_RES (4)..(4): Modified Cys
  MOD_RES (6)..(6): Ser or Phospho-Ser
  See specification as filed for detailed description of substitutions and preferred embodiments
RRICASFRRR

SEQ ID NO: 4729 - protein, 10 aa, Artificial Sequence
  Description of Artificial Sequence: Synthetic peptide
  N-term H or Acetyl
  MOD_RES (4)..(4): Modified Cys
  MOD_RES (6)..(6): Ser or Phospho-Ser
  See specification as filed for detailed description of substitutions and preferred embodiments
RRKCASFRRR

SEQ ID NO: 4730 - protein, 11 aa, Artificial Sequence
  Description of Artificial Sequence: Synthetic peptide
  N-term H or Acetyl
  MOD_RES (4)..(4): Modified Cys
  MOD_RES (6)..(6): Thr or Phospho-Thr
  MOD_RES (9)..(9): Leu or Nle (i.e. isomer of Leucine)
  See specification as filed for detailed description of substitutions and preferred embodiments
RRKCATRRLRF

SEQ ID NO: 4731 - protein, 11 aa, Artificial Sequence
  Description of Artificial Sequence: Synthetic peptide
  N-term H or Acetyl
  MOD_RES (4)..(4): Modified Cys
  MOD_RES (6)..(6): Thr or Phospho-Thr
  See specification as filed for detailed description of substitutions and preferred embodiments
RRKCATRRMRF

SEQ ID NO: 4732 - protein, 11 aa, Artificial Sequence
  Description of Artificial Sequence: Synthetic peptide
  N-term H or Acetyl
  MOD_RES (4)..(4): Modified Cys
  MOD_RES (6)..(6): Thr or Phospho-Thr
  MOD_RES (7)..(7): Leu or Nle (i.e. isomer of Leucine)
  MOD_RES (9)..(9): Leu or Nle (i.e. isomer of Leucine)
  See specification as filed for detailed description of substitutions and preferred embodiments
RRKCRTLRLRF

SEQ ID NO: 4733 - protein, 11 aa, Artificial Sequence
  Description of Artificial Sequence: Synthetic peptide
  N-term H or Acetyl
  MOD_RES (4)..(4): Modified Cys
  MOD_RES (6)..(6): Thr or Phospho-Thr
  See specification as filed for detailed description of substitutions and preferred embodiments
RRKCRTMRMRF

SEQ ID NO: 4734 - protein, 11 aa, Artificial Sequence
  Description of Artificial Sequence: Synthetic peptide
  N-term H or Acetyl
  MOD_RES (6)..(6): Thr or Phospho-Thr
  MOD_RES (8)..(8): Modified Cys
  MOD_RES (9)..(9): Leu or Nle (i.e. isomer of Leucine)
  See specification as filed for detailed description of substitutions and preferred embodiments
RRKIATRCLRF

SEQ ID NO: 4735 - protein, 11 aa, Artificial Sequence
  Description of Artificial Sequence: Synthetic peptide
  N-term H or Acetyl
  MOD_RES (6)..(6): Thr or Phospho-Thr
  MOD_RES (8)..(8): Modified Cys
  See specification as filed for detailed description of substitutions and preferred embodiments
RRKIATRCMRF

SEQ ID NO: 4736 - protein, 11 aa, Artificial Sequence
  Description of Artificial Sequence: Synthetic peptide
  N-term H or Acetyl
  MOD_RES (6)..(6): Thr or Phospho-Thr
  MOD_RES (7)..(7): Leu or Nle (i.e. isomer of Leucine)
  MOD_RES (8)..(8): Modified Cys
  MOD_RES (9)..(9): Leu or Nle (i.e. isomer of Leucine)
  See specification as filed for detailed description of substitutions and preferred embodiments
RRKIRTLCLRF

SEQ ID NO: 4737 - protein, 11 aa, Artificial Sequence
  Description of Artificial Sequence: Synthetic peptide
  N-term H or Acetyl
  MOD_RES (6)..(6): Thr or Phospho-Thr
  MOD_RES (8)..(8): Modified Cys
  See specification as filed for detailed description of substitutions and preferred embodiments
RRKIRTMCMRF

SEQ ID NO: 4738 - protein, 10 aa, Artificial Sequence
  Description of Artificial Sequence: Synthetic peptide
  N-term H or Acetyl
  MOD_RES (4)..(4): Modified Cys
  MOD_RES (6)..(6): Ser or Phospho-Ser
  See specification as filed for detailed description of substitutions and preferred embodiments
RRLCASFRRR

SEQ ID NO: 4739 - protein, 10 aa, Artificial Sequence
  Description of Artificial Sequence: Synthetic peptide
  N-term H or Acetyl
  MOD_RES (4)..(4): Modified Cys
  MOD_RES (6)..(6): Ser or Phospho-Ser
  See specification as filed for detailed description of substitutions and preferred embodiments
RRNCASFRRR

SEQ ID NO: 4740 - protein, 21 aa, Artificial Sequence
  Description of Artificial Sequence: Synthetic peptide
  N-term H or Acetyl
  MOD_RES (9)..(9): Ser or Phospho-Ser
  MOD_RES (11)..(11): Modified Cys
  MOD_RES (17)..(17): Ser or Phospho-Ser
  See specification as filed for detailed description of substitutions and preferred embodiments
RRPASVPPSPCLSRHSSHQRR

SEQ ID NO: 4741 - protein, 20 aa, Artificial Sequence
  Description of Artificial Sequence: Synthetic peptide
  N-term H or Acetyl
  MOD_RES (9)..(9): Ser or Phospho-Ser
  MOD_RES (11)..(11): Modified Cys
  MOD_RES (17)..(17): Ser or Phospho-Ser
  See specification as filed for detailed description of substitutions and preferred embodiments
RRPASVPPSPCLSRHSSHQR

SEQ ID NO: 4742 - protein, 21 aa, Artificial Sequence
  Description of Artificial Sequence: Synthetic peptide
  N-term H or Acetyl
  MOD_RES (11)..(11): Modified Cys
  MOD_RES (13)..(13): Ser or Phospho-Ser
  MOD_RES (17)..(17): Ser or Phospho-Ser
  See specification as filed for detailed description of substitutions and preferred embodiments
RRPASVPPSPCLSRHSSHQRR

SEQ ID NO: 4743 - protein, 20 aa, Artificial Sequence
  Description of Artificial Sequence: Synthetic peptide
  N-term H or Acetyl
  MOD_RES (11)..(11): Modified Cys
  MOD_RES (13)..(13): Ser or Phospho-Ser
  MOD_RES (17)..(17): Ser or Phospho-Ser
  See specification as filed for detailed description of substitutions and preferred embodiments
RRPASVPPSPCLSRHSSHQR

SEQ ID NO: 4744 - protein, 10 aa, Artificial Sequence
  Description of Artificial Sequence: Synthetic peptide
  N-term H or Acetyl
  MOD_RES (4)..(4): Modified Cys
  MOD_RES (6)..(6): Ser or Phospho-Ser
  See specification as filed for detailed description of substitutions and preferred embodiments
RRPCASFRRR

SEQ ID NO: 4745 - protein, 21 aa, Artificial Sequence
  Description of Artificial Sequence: Synthetic peptide
  N-term H or Acetyl
  MOD_RES (7)..(7): Modified Cys
  MOD_RES (9)..(9): Thr or Phospho-Thr
  See specification as filed for detailed description of substitutions and preferred embodiments
RRPWWRCYTWVVERDVNTKQR

SEQ ID NO: 4746 - protein, 10 aa, Artificial Sequence
  Description of Artificial Sequence: Synthetic peptide
  N-term H or Acetyl
  MOD_RES (4)..(4): Modified Cys
  MOD_RES (6)..(6): Ser or Phospho-Ser
  See specification as filed for detailed description of substitutions and preferred embodiments
RRQCASFRRR

SEQ ID NO: 4747 - protein, 10 aa, Artificial Sequence
  Description of Artificial Sequence: Synthetic peptide
  N-term H or Acetyl
  MOD_RES (4)..(4): Modified Cys
  MOD_RES (5)..(5): Leu or Nle (i.e. isomer of Leucine)
  MOD_RES (6)..(6): Ser or Phospho-Ser
  See specification as filed for detailed description of substitutions and preferred embodiments
RRRCLSFRRR

SEQ ID NO: 4748 - protein, 10 aa, Artificial Sequence
  Description of Artificial Sequence: Synthetic peptide
  N-term H or Acetyl
  MOD_RES (4)..(4): Modified Cys
  MOD_RES (6)..(6): Leu or Nle (i.e. isomer of Leucine)
  See specification as filed for detailed description of substitutions and preferred embodiments
RRRCALFRRR

SEQ ID NO: 4749 - protein, 10 aa, Artificial Sequence
  Description of Artificial Sequence: Synthetic peptide
  N-term H or Acetyl
  MOD_RES (4)..(4): Modified Cys
  MOD_RES (6)..(6): Ser or Phospho-Ser
  MOD_RES (7)..(7): Leu or Nle (i.e. isomer of Leucine)
  See specification as filed for detailed description of substitutions and preferred embodiments
RRRCASLRRR

SEQ ID NO: 4750 - protein, 10 aa, Artificial Sequence
  Description of Artificial Sequence: Synthetic peptide
  N-term H or Acetyl
  MOD_RES (4)..(4): Modified Cys
  MOD_RES (6)..(6): Ser or Phospho-Ser
  See specification as filed for detailed description of substitutions and preferred embodiments
RRRCASARRR

SEQ ID NO: 4751 - protein, 10 aa, Artificial Sequence
  Description of Artificial Sequence: Synthetic peptide
  N-term H or Acetyl
  MOD_RES (4)..(4): Modified Cys
  MOD_RES (6)..(6): Ser or Phospho-Ser
  See specification as filed for detailed description of substitutions and preferred embodiments
RRRCASDRRR

SEQ ID NO: 4752 - protein, 10 aa, Artificial Sequence
  Description of Artificial Sequence: Synthetic peptide
  N-term H or Acetyl
  MOD_RES (4)..(4): Modified Cys
  MOD_RES (6)..(6): Ser or Phospho-Ser
  See specification as filed for detailed description of substitutions and preferred embodiments
RRRCASERRR

SEQ ID NO: 4753 - protein, 10 aa, Artificial Sequence
  Description of Artificial Sequence: Synthetic peptide
  N-term H or Acetyl
  MOD_RES (4)..(4): Modified Cys
  MOD_RES (6)..(6): Ser or Phospho-Ser
  MOD_RES (8)..(8): Leu or Nle (i.e. isomer of Leucine)
  See specification as filed for detailed description of substitutions and preferred embodiments
RRRCASFLRR

SEQ ID NO: 4754 - protein, 10 aa, Artificial Sequence
  Description of Artificial Sequence: Synthetic peptide
  N-term H or Acetyl
  MOD_RES (4)..(4): Modified Cys
  MOD_RES (6)..(6): Ser or Phospho-Ser
  See specification as filed for detailed description of substitutions and preferred embodiments
RRRCASFARR

SEQ ID NO: 4755 - protein, 10 aa, Artificial Sequence
  Description of Artificial Sequence: Synthetic peptide
  N-term H or Acetyl
  MOD_RES (4)..(4): Modified Cys
  MOD_RES (6)..(6): Ser or Phospho-Ser
  See specification as filed for detailed description of substitutions and preferred embodiments
RRRCASFDRR

SEQ ID NO: 4756 - protein, 10 aa, Artificial Sequence
  Description of Artificial Sequence: Synthetic peptide
  N-term H or Acetyl
  MOD_RES (4)..(4): Modified Cys
  MOD_RES (6)..(6): Ser or Phospho-Ser
  See specification as filed for detailed description of substitutions and preferred embodiments
RRRCASFERR

SEQ ID NO: 4757 - protein, 10 aa, Artificial Sequence
  Description of Artificial Sequence: Synthetic peptide
  N-term H or Acetyl
  MOD_RES (4)..(4): Modified Cys
  MOD_RES (6)..(6): Ser or Phospho-Ser
  See specification as filed for detailed description of substitutions and preferred embodiments
RRRCASFFRR

SEQ ID NO: 4758 - protein, 10 aa, Artificial Sequence
  Description of Artificial Sequence: Synthetic peptide
  N-term H or Acetyl
  MOD_RES (4)..(4): Modified Cys
  MOD_RES (6)..(6): Ser or Phospho-Ser
  See specification as filed for detailed description of substitutions and preferred embodiments
RRRCASFGRR

SEQ ID NO: 4759 - protein, 10 aa, Artificial Sequence
  Description of Artificial Sequence: Synthetic peptide
  N-term H or Acetyl
  MOD_RES (4)..(4): Modified Cys
  MOD_RES (6)..(6): Ser or Phospho-Ser
  See specification as filed for detailed description of substitutions and preferred embodiments
RRRCASFHRR

SEQ ID NO: 4760 - protein, 10 aa, Artificial Sequence
  Description of Artificial Sequence: Synthetic peptide
  N-term H or Acetyl
  MOD_RES (4)..(4): Modified Cys
  MOD_RES (6)..(6): Ser or Phospho-Ser
  See specification as filed for detailed description of substitutions and preferred embodiments
RRRCASFIRR

SEQ ID NO: 4761 - protein, 10 aa, Artificial Sequence
  Description of Artificial Sequence: Synthetic peptide
  N-term H or Acetyl
  MOD_RES (4)..(4): Modified Cys
  MOD_RES (6)..(6): Ser or Phospho-Ser
  See specification as filed for detailed description of substitutions and preferred embodiments
RRRCASFKRR

SEQ ID NO: 4762 - protein, 10 aa, Artificial Sequence
  Description of Artificial Sequence: Synthetic peptide
  N-term H or Acetyl
  MOD_RES (4)..(4): Modified Cys
  MOD_RES (6)..(6): Ser or Phospho-Ser
  See specification as filed for detailed description of substitutions and preferred embodiments
RRRCASFLRR

SEQ ID NO: 4763 - protein, 10 aa, Artificial Sequence
  Description of Artificial Sequence: Synthetic peptide
  N-term H or Acetyl
  MOD_RES (4)..(4): Modified Cys
  MOD_RES (6)..(6): Ser or Phospho-Ser
  See specification as filed for detailed description of substitutions and preferred embodiments
RRRCASFNRR

SEQ ID NO: 4764 - protein, 10 aa, Artificial Sequence
  Description of Artificial Sequence: Synthetic peptide
  N-term H or Acetyl
  MOD_RES (4)..(4): Modified Cys
  MOD_RES (6)..(6): Ser or Phospho-Ser
  See specification as filed for detailed description of substitutions and preferred embodiments
RRRCASFPRR

SEQ ID NO: 4765 - protein, 10 aa, Artificial Sequence
  Description of Artificial Sequence: Synthetic peptide
  N-term H or Acetyl
  MOD_RES (4)..(4): Modified Cys
  MOD_RES (6)..(6): Ser or Phospho-Ser
  See specification as filed for detailed description of substitutions and preferred embodiments
RRRCASFQRR

SEQ ID NO: 4766 - protein, 10 aa, Artificial Sequence
  Description of Artificial Sequence: Synthetic peptide
  N-term H or Acetyl
  MOD_RES (4)..(4): Modified Cys
  MOD_RES (6)..(6): Ser or Phospho-Ser
  MOD_RES (9)..(9): Leu or Nle (i.e. isomer of Leucine)
  See specification as filed for detailed description of substitutions and preferred embodiments
RRRCASFRLR

SEQ ID NO: 4767 - protein, 10 aa, Artificial Sequence
  Description of Artificial Sequence: Synthetic peptide
  N-term H or Acetyl
  MOD_RES (4)..(4): Modified Cys
  MOD_RES (6)..(6): Ser or Phospho-Ser
  See specification as filed for detailed description of substitutions and preferred embodiments
RRRCASFRAR

SEQ ID NO: 4768 - protein, 10 aa, Artificial Sequence
  Description of Artificial Sequence: Synthetic peptide
  N-term H or Acetyl
  MOD_RES (4)..(4): Modified Cys
  MOD_RES (6)..(6): Ser or Phospho-Ser
  See specification as filed for detailed description of substitutions and preferred embodiments
RRRCASFRDR

SEQ ID NO: 4769 - protein, 10 aa, Artificial Sequence
  Description of Artificial Sequence: Synthetic peptide
  N-term H or Acetyl
  MOD_RES (4)..(4): Modified Cys
  MOD_RES (6)..(6): Ser or Phospho-Ser
  See specification as filed for detailed description of substitutions and preferred embodiments
RRRCASFRER

SEQ ID NO: 4770 - protein, 10 aa, Artificial Sequence
  Description of Artificial Sequence: Synthetic peptide
  N-term H or Acetyl
  MOD_RES (4)..(4): Modified Cys
  MOD_RES (6)..(6): Ser or Phospho-Ser
  See specification as filed for detailed description of substitutions and preferred embodiments
RRRCASFRFR

SEQ ID NO: 4771 - protein, 10 aa, Artificial Sequence
  Description of Artificial Sequence: Synthetic peptide
  N-term H or Acetyl
  MOD_RES (4)..(4): Modified Cys
  MOD_RES (6)..(6): Ser or Phospho-Ser
  See specification as filed for detailed description of substitutions and preferred embodiments
RRRCASFRGR

SEQ ID NO: 4772 - protein, 10 aa, Artificial Sequence
  Description of Artificial Sequence: Synthetic peptide
  N-term H or Acetyl
  MOD_RES (4)..(4): Modified Cys
  MOD_RES (6)..(6): Ser or Phospho-Ser
  See specification as filed for detailed description of substitutions and preferred embodiments
RRRCASFRHR

SEQ ID NO: 4773 - protein, 10 aa, Artificial Sequence
  Description of Artificial Sequence: Synthetic peptide
  N-term H or Acetyl
  MOD_RES (4)..(4): Modified Cys
  MOD_RES (6)..(6): Ser or Phospho-Ser
  See specification as filed for detailed description of substitutions and preferred embodiments
RRRCASFRIR

SEQ ID NO: 4774 - protein, 10 aa, Artificial Sequence
  Description of Artificial Sequence: Synthetic peptide
  N-term H or Acetyl
  MOD_RES (4)..(4): Modified Cys
  MOD_RES (6)..(6): Ser or Phospho-Ser
  See specification as filed for detailed description of substitutions and preferred embodiments
RRRCASFRKR

SEQ ID NO: 4775 - protein, 10 aa, Artificial Sequence
  Description of Artificial Sequence: Synthetic peptide
  N-term H or Acetyl
  MOD_RES (4)..(4): Modified Cys
  MOD_RES (6)..(6): Ser or Phospho-Ser
  See specification as filed for detailed description of substitutions and preferred embodiments
RRRCASFRLR

SEQ ID NO: 4776 - protein, 10 aa, Artificial Sequence
  Description of Artificial Sequence: Synthetic peptide
  N-term H or Acetyl
  MOD_RES (4)..(4): Modified Cys
  MOD_RES (6)..(6): Ser or Phospho-Ser
  See specification as filed for detailed description of substitutions and preferred embodiments
RRRCASFRNR

SEQ ID NO: 4777 - protein, 10 aa, Artificial Sequence
  Description of Artificial Sequence: Synthetic peptide
  N-term H or Acetyl
  MOD_RES (4)..(4): Modified Cys
  MOD_RES (6)..(6): Ser or Phospho-Ser
  See specification as filed for detailed description of substitutions and preferred embodiments
RRRCASFRPR

SEQ ID NO: 4778 - protein, 10 aa, Artificial Sequence
  Description of Artificial Sequence: Synthetic peptide
  N-term H or Acetyl
  MOD_RES (4)..(4): Modified Cys
  MOD_RES (6)..(6): Ser or Phospho-Ser
  See specification as filed for detailed description of substitutions and preferred embodiments
RRRCASFRQR

SEQ ID NO: 4779 - protein, 10 aa, Artificial Sequence
  Description of Artificial Sequence: Synthetic peptide
  N-term H or Acetyl
  MOD_RES (4)..(4): Modified Cys
  MOD_RES (6)..(6): Ser or Phospho-Ser
  MOD_RES (10)..(10): Leu or Nle (i.e. isomer of Leucine)
  See specification as filed for detailed description of substitutions and preferred embodiments
RRRCASFRRL

SEQ ID NO: 4780 - protein, 10 aa, Artificial Sequence
  Description of Artificial Sequence: Synthetic peptide
  N-term H or Acetyl
  MOD_RES (4)..(4): Modified Cys
  MOD_RES (6)..(6): Ser or Phospho-Ser
  See specification as filed for detailed description of substitutions and preferred embodiments
RRRCASFRRA

SEQ ID NO: 4781 - protein, 10 aa, Artificial Sequence
  Description of Artificial Sequence: Synthetic peptide
  N-term H or Acetyl
  MOD_RES (4)..(4): Modified Cys
  MOD_RES (6)..(6): Ser or Phospho-Ser
  See specification as filed for detailed description of substitutions and preferred embodiments
RRRCASFRRD

SEQ ID NO: 4782 - protein, 10 aa, Artificial Sequence
  Description of Artificial Sequence: Synthetic peptide
  N-term H or Acetyl
  MOD_RES (4)..(4): Modified Cys
  MOD_RES (6)..(6): Ser or Phospho-Ser
  See specification as filed for detailed description of substitutions and preferred embodiments
RRRCASFRRE

SEQ ID NO: 4783 - protein, 10 aa, Artificial Sequence
  Description of Artificial Sequence: Synthetic peptide
  N-term H or Acetyl
  MOD_RES (4)..(4): Modified Cys
  MOD_RES (6)..(6): Ser or Phospho-Ser
  See specification as filed for detailed description of substitutions and preferred embodiments
RRRCASFRRF

SEQ ID NO: 4784 - protein, 10 aa, Artificial Sequence
  Description of Artificial Sequence: Synthetic peptide
  N-term H or Acetyl
  MOD_RES (4)..(4): Modified Cys
  MOD_RES (6)..(6): Ser or Phospho-Ser
  See specification as filed for detailed description of substitutions and preferred embodiments
RRRCASFRRG

SEQ ID NO: 4785 - protein, 10 aa, Artificial Sequence
  Description of Artificial Sequence: Synthetic peptide
  N-term H or Acetyl
  MOD_RES (4)..(4): Modified Cys
  MOD_RES (6)..(6): Ser or Phospho-Ser
  See specification as filed for detailed description of substitutions and preferred embodiments
RRRCASFRRH

SEQ ID NO: 4786 - protein, 10 aa, Artificial Sequence
  Description of Artificial Sequence: Synthetic peptide
  N-term H or Acetyl
  MOD_RES (4)..(4): Modified Cys
  MOD_RES (6)..(6): Ser or Phospho-Ser
  See specification as filed for detailed description of substitutions and preferred embodiments
RRRCASFRRI

SEQ ID NO: 4787 - protein, 10 aa, Artificial Sequence
  Description of Artificial Sequence: Synthetic peptide
  N-term H or Acetyl
  MOD_RES (4)..(4): Modified Cys
  MOD_RES (6)..(6): Ser or Phospho-Ser
  See specification as filed for detailed description of substitutions and preferred embodiments
RRRCASFRRK

SEQ ID NO: 4788 - protein, 10 aa, Artificial Sequence
  Description of Artificial Sequence: Synthetic peptide
  N-term H or Acetyl
  MOD_RES (4)..(4): Modified Cys
  MOD_RES (6)..(6): Ser or Phospho-Ser
  See specification as filed for detailed description of substitutions and preferred embodiments
RRRCASFRRL

SEQ ID NO: 4789 - protein, 10 aa, Artificial Sequence
  Description of Artificial Sequence: Synthetic peptide
  N-term H or Acetyl
  MOD_RES (4)..(4): Modified Cys
  MOD_RES (6)..(6): Ser or Phospho-Ser
  See specification as filed for detailed description of substitutions and preferred embodiments
RRRCASFRRN

SEQ ID NO: 4790 - protein, 10 aa, Artificial Sequence
  Description of Artificial Sequence: Synthetic peptide
  N-term H or Acetyl
  MOD_RES (4)..(4): Modified Cys
  MOD_RES (6)..(6): Ser or Phospho-Ser
  See specification as filed for detailed description of substitutions and preferred embodiments
RRRCASFRRP

SEQ ID NO: 4791 - protein, 10 aa, Artificial Sequence
  Description of Artificial Sequence: Synthetic peptide
  N-term H or Acetyl
  MOD_RES (4)..(4): Modified Cys
  MOD_RES (6)..(6): Ser or Phospho-Ser
  See specification as filed for detailed description of substitutions and preferred embodiments
RRRCASFRRQ

SEQ ID NO: 4792 - protein, 10 aa, Artificial Sequence
  Description of Artificial Sequence: Synthetic peptide
  N-term H or Acetyl
  MOD_RES (4)..(4): Modified Cys
  MOD_RES (6)..(6): Ser or Phospho-Ser
  See specification as filed for detailed description of substitutions and preferred embodiments
RRRCASFRRR

SEQ ID NO: 4793 - protein, 10 aa, Artificial Sequence
  Description of Artificial Sequence: Synthetic peptide
  N-term H or Acetyl
  MOD_RES (4)..(4): Modified Cys
  MOD_RES (6)..(6): Ser or Phospho-Ser
  See specification as filed for detailed description of substitutions and preferred embodiments
RRRCASFRRV

SEQ ID NO: 4794 - protein, 10 aa, Artificial Sequence
  Description of Artificial Sequence: Synthetic peptide
  N-term H or Acetyl
  MOD_RES (4)..(4): Modified Cys
  MOD_RES (6)..(6): Ser or Phospho-Ser
  See specification as filed for detailed description of substitutions and preferred embodiments
RRRCASFRRW

SEQ ID NO: 4795 - protein, 9 aa, Artificial Sequence
  Description of Artificial Sequence: Synthetic peptide
  N-term H or Acetyl
  MOD_RES (4)..(4): Modified Cys
  MOD_RES (6)..(6): Ser or Phospho-Ser
  See specification as filed for detailed description of substitutions and preferred embodiments
RRRCASFRR

SEQ ID NO: 4796 - protein, 10 aa, Artificial Sequence
  Description of Artificial Sequence: Synthetic peptide
  N-term H or Acetyl
  MOD_RES (4)..(4): Modified Cys
  MOD_RES (6)..(6): Ser or Phospho-Ser
  See specification as filed for detailed description of substitutions and preferred embodiments
RRRCASFRVR

SEQ ID NO: 4797 - protein, 10 aa, Artificial Sequence
  Description of Artificial Sequence: Synthetic peptide
  N-term H or Acetyl
  MOD_RES (4)..(4): Modified Cys
  MOD_RES (6)..(6): Ser or Phospho-Ser
  See specification as filed for detailed description of substitutions and preferred embodiments
RRRCASFRWR

SEQ ID NO: 4798 - protein, 8 aa, Artificial Sequence
  Description of Artificial Sequence: Synthetic peptide
  N-term H or Acetyl
  MOD_RES (4)..(4): Modified Cys
  MOD_RES (6)..(6): Ser or Phospho-Ser
  See specification as filed for detailed description of substitutions and preferred embodiments
RRRCASFR

SEQ ID NO: 4799 - protein, 10 aa, Artificial Sequence
  Description of Artificial Sequence: Synthetic peptide
  N-term H or Acetyl
  MOD_RES (4)..(4): Modified Cys
  MOD_RES (6)..(6): Ser or Phospho-Ser
  See specification as filed for detailed description of substitutions and preferred embodiments
RRRCASFVRR

SEQ ID NO: 4800 - protein, 10 aa, Artificial Sequence
  Description of Artificial Sequence: Synthetic peptide
  N-term H or Acetyl
  MOD_RES (4)..(4): Modified Cys
  MOD_RES (6)..(6): Ser or Phospho-Ser
  See specification as filed for detailed description of substitutions and preferred embodiments
RRRCASFWRR

SEQ ID NO: 4801 - protein, 10 aa, Artificial Sequence
  Description of Artificial Sequence: Synthetic peptide
  N-term H or Acetyl
  MOD_RES (4)..(4): Modified Cys
  MOD_RES (6)..(6): Ser or Phospho-Ser
  See specification as filed for detailed description of substitutions and preferred embodiments
RRRCASGRRR

SEQ ID NO: 4802 - protein, 10 aa, Artificial Sequence
  Description of Artificial Sequence: Synthetic peptide
  N-term H or Acetyl
  MOD_RES (4)..(4): Modified Cys
  MOD_RES (6)..(6): Ser or Phospho-Ser
  See specification as filed for detailed description of substitutions and preferred embodiments
RRRCASHRRR

SEQ ID NO: 4803 - protein, 10 aa, Artificial Sequence
  Description of Artificial Sequence: Synthetic peptide
  N-term H or Acetyl
  MOD_RES (4)..(4): Modified Cys
  MOD_RES (6)..(6): Ser or Phospho-Ser
  See specification as filed for detailed description of substitutions and preferred embodiments
RRRCASIRRR

SEQ ID NO: 4804 - protein, 10 aa, Artificial Sequence
  Description of Artificial Sequence: Synthetic peptide
  N-term H or Acetyl
  MOD_RES (4)..(4): Modified Cys
  MOD_RES (6)..(6): Ser or Phospho-Ser
  See specification as filed for detailed description of substitutions and preferred embodiments
RRRCASKRRR

SEQ ID NO: 4805 - protein, 10 aa, Artificial Sequence
  Description of Artificial Sequence: Synthetic peptide
  N-term H or Acetyl
  MOD_RES (4)..(4): Modified Cys
  MOD_RES (6)..(6): Ser or Phospho-Ser
  See specification as filed for detailed description of substitutions and preferred embodiments
RRRCASLRRR

SEQ ID NO: 4806 - protein, 10 aa, Artificial Sequence
  Description of Artificial Sequence: Synthetic peptide
  N-term H or Acetyl
  MOD_RES (4)..(4): Modified Cys
  MOD_RES (6)..(6): Ser or Phospho-Ser
  See specification as filed for detailed description of substitutions and preferred embodiments
RRRCASNRRR

SEQ ID NO: 4807 - protein, 10 aa, Artificial Sequence
  Description of Artificial Sequence: Synthetic peptide
  N-term H or Acetyl
  MOD_RES (4)..(4): Modified Cys
  MOD_RES (6)..(6): Ser or Phospho-Ser
  See specification as filed for detailed description of substitutions and preferred embodiments
RRRCASPRRR

SEQ ID NO: 4808 - protein, 10 aa, Artificial Sequence
  Description of Artificial Sequence: Synthetic peptide
  N-term H or Acetyl
  MOD_RES (4)..(4): Modified Cys
  MOD_RES (6)..(6): Ser or Phospho-Ser
  See specification as filed for detailed description of substitutions and preferred embodiments
RRRCASQRRR

SEQ ID NO: 4809 - protein, 10 aa, Artificial Sequence
  Description of Artificial Sequence: Synthetic peptide
  N-term H or Acetyl
  MOD_RES (4)..(4): Modified Cys
  MOD_RES (6)..(6): Ser or Phospho-Ser
  See specification as filed for detailed description of substitutions and preferred embodiments
RRRCASRRRR

SEQ ID NO: 4810 - protein, 10 aa, Artificial Sequence
  Description of Artificial Sequence: Synthetic peptide
  N-term H or Acetyl
  MOD_RES (4)..(4): Modified Cys
  MOD_RES (6)..(6): Ser or Phospho-Ser
  See specification as filed for detailed description of substitutions and preferred embodiments
RRRCASVRRR

SEQ ID NO: 4811 - protein, 10 aa, Artificial Sequence
  Description of Artificial Sequence: Synthetic peptide
  N-term H or Acetyl
  MOD_RES (4)..(4): Modified Cys
  MOD_RES (6)..(6): Ser or Phospho-Ser
  See specification as filed for detailed description of substitutions and preferred embodiments
RRRCASWRRR

SEQ ID NO: 4812 - protein, 10 aa, Artificial Sequence
  Description of Artificial Sequence: Synthetic peptide
  N-term H or Acetyl
  MOD_RES (4)..(4): Modified Cys
  MOD_RES (6)..(6): Ser or Phospho-Ser
  See specification as filed for detailed description of substitutions and preferred embodiments
RRRCDSFRRR

SEQ ID NO: 4813 - protein, 10 aa, Artificial Sequence
  Description of Artificial Sequence: Synthetic peptide
  N-term H or Acetyl
  MOD_RES (4)..(4): Modified Cys
  MOD_RES (6)..(6): Ser or Phospho-Ser
  See specification as filed for detailed description of substitutions and preferred embodiments
RRRCESFRRR

SEQ ID NO: 4814 - protein, 10 aa, Artificial Sequence
  Description of Artificial Sequence: Synthetic peptide
  N-term H or Acetyl
  MOD_RES (4)..(4): Modified Cys
  MOD_RES (6)..(6): Ser or Phospho-Ser
  See specification as filed for detailed description of substitutions and preferred embodiments
RRRCFSFRRR

SEQ ID NO: 4815 - protein, 11 aa, Artificial Sequence
  Description of Artificial Sequence: Synthetic peptide
  N-term H or Acetyl
  MOD_RES (4)..(4): Modified Cys
  MOD_RES (6)..(6): Ser or Phospho-Ser
  See specification as filed for detailed description of substitutions and preferred embodiments
RRRCFSLRRKA

SEQ ID NO: 4816 - protein, 10 aa, Artificial Sequence
  Description of Artificial Sequence: Synthetic peptide
  N-term H or Acetyl
  MOD_RES (4)..(4): Modified Cys
  MOD_RES (6)..(6): Ser or Phospho-Ser
  See specification as filed for detailed description of substitutions and preferred embodiments
RRRCGSFRRR

SEQ ID NO: 4817 - protein, 10 aa, Artificial Sequence
  Description of Artificial Sequence: Synthetic peptide
  N-term H or Acetyl
  MOD_RES (4)..(4): Modified Cys
  MOD_RES (6)..(6): Ser or Phospho-Ser
  See specification as filed for detailed description of substitutions and preferred embodiments
RRRCHSFRRR

SEQ ID NO: 4818 - protein, 10 aa, Artificial Sequence
  Description of Artificial Sequence: Synthetic peptide
  N-term H or Acetyl
  MOD_RES (4)..(4): Modified Cys
  MOD_RES (6)..(6): Ser or Phospho-Ser
  See specification as filed for detailed description of substitutions and preferred embodiments
RRRCISFRRR

SEQ ID NO: 4819 - protein, 10 aa, Artificial Sequence
  Description of Artificial Sequence: Synthetic peptide
  N-term H or Acetyl
  MOD_RES (4)..(4): Modified Cys
  MOD_RES (6)..(6): Ser or Phospho-Ser
  See specification as filed for detailed description of substitutions and preferred embodiments
RRRCKSFRRR

SEQ ID NO: 4820 - protein, 10 aa, Artificial Sequence
  Description of Artificial Sequence: Synthetic peptide
  N-term H or Acetyl
  MOD_RES (4)..(4): Modified Cys
  MOD_RES (6)..(6): Ser or Phospho-Ser
  See specification as filed for detailed description of substitutions and preferred embodiments
RRRCLSFRRR

SEQ ID NO: 4821 - protein, 10 aa, Artificial Sequence
  Description of Artificial Sequence: Synthetic peptide
  N-term H or Acetyl
  MOD_RES (4)..(4): Modified Cys
  MOD_RES (6)..(6): Ser or Phospho-Ser
  See specification as filed for detailed description of substitutions and preferred embodiments
RRRCNSFRRR

SEQ ID NO: 4822 - protein, 10 aa, Artificial Sequence
  Description of Artificial Sequence: Synthetic peptide
  N-term H or Acetyl
  MOD_RES (4)..(4): Modified Cys
  MOD_RES (6)..(6): Ser or Phospho-Ser
  See specification as filed for detailed description of substitutions and preferred embodiments
RRRCPSFRRR

SEQ ID NO: 4823 - protein, 10 aa, Artificial Sequence
  Description of Artificial Sequence: Synthetic peptide
  N-term H or Acetyl
  MOD_RES (4)..(4): Modified Cys
  MOD_RES (6)..(6): Ser or Phospho-Ser
  See specification as filed for detailed description of substitutions and preferred embodiments
RRRCQSFRRR

SEQ ID NO: 4824 - protein, 10 aa, Artificial Sequence
  Description of Artificial Sequence: Synthetic peptide
  N-term H or Acetyl
  MOD_RES (4)..(4): Modified Cys
  MOD_RES (6)..(6): Ser or Phospho-Ser
  See specification as filed for detailed description of substitutions and preferred embodiments
RRRCRSFRRR

SEQ ID NO: 4825 - protein, 10 aa, Artificial Sequence
  Description of Artificial Sequence: Synthetic peptide
  N-term H or Acetyl
  MOD_RES (4)..(4): Modified Cys
  MOD_RES (6)..(6): Ser or Phospho-Ser
  See specification as filed for detailed description of substitutions and preferred embodiments
RRRCVSFRRR

SEQ ID NO: 4826 - protein, 10 aa, Artificial Sequence
  Description of Artificial Sequence: Synthetic peptide
  N-term H or Acetyl
  MOD_RES (4)..(4): Modified Cys
  MOD_RES (6)..(6): Ser or Phospho-Ser
  See specification as filed for detailed description of substitutions and preferred embodiments
RRRCWSFRRR

SEQ ID NO: 4827 - protein, 15 aa, Artificial Sequence
  Description of Artificial Sequence: Synthetic peptide
  N-term H or Acetyl
  MOD_RES (6)..(6): Modified Cys
  MOD_RES (8)..(8): Ser or Phospho-Ser
  See specification as filed for detailed description of substitutions and preferred embodiments
RRRLSCVSLTGVSTI

SEQ ID NO: 4828 - protein, 15 aa, Artificial Sequence
  Description of Artificial Sequence: Synthetic peptide
  N-term H or Acetyl
  MOD_RES (8)..(8): Ser or Phospho-Ser
  MOD_RES (10)..(10): Modified Cys
  See specification as filed for detailed description of substitutions and preferred embodiments
RRRLSNVSLCGVSTI

SEQ ID NO: 4829 - protein, 22 aa, Artificial Sequence
  Description of Artificial Sequence: Synthetic peptide
  N-term H or Acetyl
  MOD_RES (10)..(10): Ser or Phospho-Ser
  MOD_RES (12)..(12): Modified Cys
  MOD_RES (18)..(18): Ser or Phospho-Ser
  See specification as filed for detailed description of substitutions and preferred embodiments
RRRPASVPPSPCLSRHSSHQRR

SEQ ID NO: 4830 - protein, 21 aa, Artificial Sequence
  Description of Artificial Sequence: Synthetic peptide
  N-term H or Acetyl
  MOD_RES (10)..(10): Ser or Phospho-Ser
  MOD_RES (12)..(12): Modified Cys
  MOD_RES (18)..(18): Ser or Phospho-Ser
  See specification as filed for detailed description of substitutions and preferred embodiments
RRRPASVPPSPCLSRHSSHQR

SEQ ID NO: 4831 - protein, 22 aa, Artificial Sequence
  Description of Artificial Sequence: Synthetic peptide
  N-term H or Acetyl
  MOD_RES (12)..(12): Modified Cys
  MOD_RES (14)..(14): Ser or Phospho-Ser
  MOD_RES (18)..(18): Ser or Phospho-Ser
  See specification as filed for detailed description of substitutions and preferred embodiments
RRRPASVPPSPCLSRHSSHQRR

SEQ ID NO: 4832 - protein, 21 aa, Artificial Sequence
  Description of Artificial Sequence: Synthetic peptide
  N-term H or Acetyl
  MOD_RES (12)..(12): Modified Cys
  MOD_RES (14)..(14): Ser or Phospho-Ser
  MOD_RES (18)..(18): Ser or Phospho-Ser
  See specification as filed for detailed description of substitutions and preferred embodiments
RRRPASVPPSPCLSRHSSHQR

SEQ ID NO: 4833 - protein, 11 aa, Artificial Sequence
  Description of Artificial Sequence: Synthetic peptide
  N-term H or Acetyl
  MOD_RES (6)..(6): Ser or Phospho-Ser
  MOD_RES (8)..(8): Modified Cys
  See specification as filed for detailed description of substitutions and preferred embodiments
RRRQFSLCRKA

SEQ ID NO: 4834 - protein, 10 aa, Artificial Sequence
  Description of Artificial Sequence: Synthetic peptide
  N-term H or Acetyl
  MOD_RES (4)..(4): Modified Cys
  MOD_RES (6)..(6): Ser or Phospho-Ser
  See specification as filed for detailed description of substitutions and preferred embodiments
RRVCASFRRR

SEQ ID NO: 4835 - protein, 15 aa, Artificial Sequence
  Description of Artificial Sequence: Synthetic peptide
  N-term H or Acetyl
  MOD_RES (8)..(8): Ser or Phospho-Ser
  MOD_RES (10)..(10): Modified Cys
  See specification as filed for detailed description of substitutions and preferred embodiments
RRVSGNNSPCLSNGG

SEQ ID NO: 4836 - protein, 15 aa, Artificial Sequence
  Description of Artificial Sequence: Synthetic peptide
  N-term H or Acetyl
  MOD_RES (10)..(10): Modified Cys
  MOD_RES (12)..(12): Ser or Phospho-Ser
  See specification as filed for detailed description of substitutions and preferred embodiments
RRVSGNNSPCLSNGG

SEQ ID NO: 4837 - protein, 10 aa, Artificial Sequence
  Description of Artificial Sequence: Synthetic peptide
  N-term H or Acetyl
  MOD_RES (4)..(4): Modified Cys
  MOD_RES (6)..(6): Ser or Phospho-Ser
  See specification as filed for detailed description of substitutions and preferred embodiments
RRWCASFRRR

SEQ ID NO: 4838 - protein, 15 aa, Artificial Sequence
  Description of Artificial Sequence: Synthetic peptide
  N-term H or Acetyl
  MOD_RES (8)..(8): Ser or Phospho-Ser
  MOD_RES (10)..(10): Modified Cys
  See specification as filed for detailed description of substitutions and preferred embodiments
RSKSAPTSPCDQEIK

SEQ ID NO: 4839 - protein, 9 aa, Artificial Sequence
  Description of Artificial Sequence: Synthetic peptide
  N-term H or Acetyl
  MOD_RES (6)..(6): Ser or Phospho-Ser
  MOD_RES (8)..(8): Modified Cys
  See specification as filed for detailed description of substitutions and preferred embodiments
RSRSRSRCR

SEQ ID NO: 4840 - protein, 11 aa, Artificial Sequence
  Description of Artificial Sequence: Synthetic peptide
  N-term H or Acetyl
  MOD_RES (8)..(8): Ser or Phospho-Ser
  MOD_RES (10)..(10): Modified Cys
  See specification as filed for detailed description of substitutions and preferred embodiments
RSRSRSRSRCR

SEQ ID NO: 4841 - protein, 20 aa, Artificial Sequence
  Description of Artificial Sequence: Synthetic peptide
  N-term H or Acetyl
  MOD_RES (10)..(10): Ser or Phospho-Ser
  MOD_RES (12)..(12): Modified Cys
  See specification as filed for detailed description of substitutions and preferred embodiments
RSRSRSRSNSRCRSYSPRRS

SEQ ID NO: 4842 - protein, 20 aa, Artificial Sequence
  Description of Artificial Sequence: Synthetic peptide
  N-term H or Acetyl
  MOD_RES (12)..(12): Modified Cys
  MOD_RES (14)..(14): Ser or Phospho-Ser
  See specification as filed for detailed description of substitutions and preferred embodiments
RSRSRSRSNSRCRSYSPRRS

SEQ ID NO: 4843 - protein, 20 aa, Artificial Sequence
  Description of Artificial Sequence: Synthetic peptide
  N-term H or Acetyl
  MOD_RES (12)..(12): Ser or Phospho-Ser
  MOD_RES (14)..(14): Modified Cys
  See specification as filed for detailed description of substitutions and preferred embodiments
RSRSRSRSNSRSRCYSPRRS

SEQ ID NO: 4844 - protein, 20 aa, Artificial Sequence
  Description of Artificial Sequence: Synthetic peptide
  N-term H or Acetyl
  MOD_RES (14)..(14): Modified Cys
  MOD_RES (16)..(16): Ser or Phospho-Ser
  See specification as filed for detailed description of substitutions and preferred embodiments
RSRSRSRSNSRSRCYSPRRS

SEQ ID NO: 4845 - protein, 15 aa, Artificial Sequence
  Description of Artificial Sequence: Synthetic peptide
  N-term H or Acetyl
  MOD_RES (10)..(10): Ser or Phospho-Ser
  MOD_RES (12)..(12): Modified Cys
  See specification as filed for detailed description of substitutions and preferred embodiments
RSRSRSRSRSRCRAR

SEQ ID NO: 4846 - protein, 15 aa, Artificial Sequence
  Description of Artificial Sequence: Synthetic peptide
  N-term H or Acetyl
  MOD_RES (10)..(10): Ser or Phospho-Ser
  MOD_RES (12)..(12): Modified Cys
  See specification as filed for detailed description of substitutions and preferred embodiments
RSRSRSRSRSRCRGR

SEQ ID NO: 4847 - protein, 13 aa, Artificial Sequence
  Description of Artificial Sequence: Synthetic peptide
  N-term H or Acetyl
  MOD_RES (10)..(10): Ser or Phospho-Ser
  MOD_RES (12)..(12): Modified Cys
  See specification as filed for detailed description of substitutions and preferred embodiments
RSRSRSRSRSRCR

SEQ ID NO: 4848 - protein, 20 aa, Artificial Sequence
  Description of Artificial Sequence: Synthetic peptide
  N-term H or Acetyl
  MOD_RES (16)..(16): Ser or Phospho-Ser
  MOD_RES (18)..(18): Modified Cys
  See specification as filed for detailed description of substitutions and preferred embodiments
RSRSRSRSRSNSRSRSYCPR

SEQ ID NO: 4849 - protein, 15 aa, Artificial Sequence
  Description of Artificial Sequence: Synthetic peptide
  N-term H or Acetyl
  MOD_RES (12)..(12): Ser or Phospho-Ser
  MOD_RES (14)..(14): Modified Cys
  See specification as filed for detailed description of substitutions and preferred embodiments
RSRSRSRSRSRSRCR

SEQ ID NO: 4850 - protein, 13 aa, Artificial Sequence
  Description of Artificial Sequence: Synthetic peptide
  N-term H or Acetyl
  MOD_RES (8)..(8): Thr or Phospho-Thr
  MOD_RES (10)..(10): Modified Cys
  See specification as filed for detailed description of substitutions and preferred embodiments
RTDSLAATPCAAK

SEQ ID NO: 4851 - protein, 21 aa, Artificial Sequence
  Description of Artificial Sequence: Synthetic peptide
  N-term H or Acetyl
  MOD_RES (4)..(4): Modified Cys
  MOD_RES (6)..(6): Ser or Phospho-Ser
  See specification as filed for detailed description of substitutions and preferred embodiments
RVGCASSLENTVDLHISNSHP

SEQ ID NO: 4852 - protein, 21 aa, Artificial Sequence
  Description of Artificial Sequence: Synthetic peptide
  N-term H or Acetyl
  MOD_RES (7)..(7): Ser or Phospho-Ser
  MOD_RES (9)..(9): Modified Cys
  See specification as filed for detailed description of substitutions and preferred embodiments
RVGGASSLCNTVDLHISNSHP

SEQ ID NO: 4853 - protein, 21 aa, Artificial Sequence
  Description of Artificial Sequence: Synthetic peptide
  N-term H or Acetyl
  MOD_RES (9)..(9): Modified Cys
  MOD_RES (11)..(11): Thr or Phospho-Thr
  See specification as filed for detailed description of substitutions and preferred embodiments
RVGGASSLCNTVDLHISNSHP

SEQ ID NO: 4854 - protein, 21 aa, Artificial Sequence
  Description of Artificial Sequence: Synthetic peptide
  N-term H or Acetyl
  MOD_RES (7)..(7): Modified Cys
  MOD_RES (9)..(9): Thr or Phospho-Thr
  See specification as filed for detailed description of substitutions and preferred embodiments
RVPWWRCYTWVVERDVNTKQR

SEQ ID NO: 4855 - protein, 10 aa, Artificial Sequence
  Description of Artificial Sequence: Synthetic peptide
  N-term H or Acetyl
  MOD_RES (4)..(4): Modified Cys
  MOD_RES (6)..(6): Ser or Phospho-Ser
  See specification as filed for detailed description of substitutions and preferred embodiments
RVRCASFRRR

SEQ ID NO: 4856 - protein, 21 aa, Artificial Sequence
  Description of Artificial Sequence: Synthetic peptide
  N-term H or Acetyl
  MOD_RES (7)..(7): Modified Cys
  MOD_RES (9)..(9): Thr or Phospho-Thr
  See specification as filed for detailed description of substitutions and preferred embodiments
RWPWWRCYTWVVERDVNTKQR

SEQ ID NO: 4857 - protein, 10 aa, Artificial Sequence
  Description of Artificial Sequence: Synthetic peptide
  N-term H or Acetyl
  MOD_RES (4)..(4): Modified Cys
  MOD_RES (6)..(6): Ser or Phospho-Ser
  See specification as filed for detailed description of substitutions and preferred embodiments
RWRCASFRRR

SEQ ID NO: 4858 - protein, 14 aa, Artificial Sequence
  Description of Artificial Sequence: Synthetic peptide
  N-term H or Acetyl
  MOD_RES (1)..(1): Ser or Phospho-Ser
  MOD_RES (3)..(3): Modified Cys
  See specification as filed for detailed description of substitutions and preferred embodiments
SRCLSVSSLPGLED

SEQ ID NO: 4859 - protein, 14 aa, Artificial Sequence
  Description of Artificial Sequence: Synthetic peptide
  N-term H or Acetyl
  MOD_RES (1)..(1): Ser or Phospho-Ser
  MOD_RES (3)..(3): Modified Cys
  MOD_RES (9)..(9): Ser or Phospho-Ser
  See specification as filed for detailed description of substitutions and preferred embodiments
SRCSSPHQSEDEEE

SEQ ID NO: 4860 - protein, 15 aa, Artificial Sequence
  Description of Artificial Sequence: Synthetic peptide
  N-term H or Acetyl
  MOD_RES (4)..(4): Ser or Phospho-Ser
  MOD_RES (6)..(6): Modified Cys
  MOD_RES (13)..(13): Leu or Nle (i.e. isomer of Leucine)
  See specification as filed for detailed description of substitutions and preferred embodiments
SAKSRCQTAPVPLPD

SEQ ID NO: 4861 - protein, 15 aa, Artificial Sequence
  Description of Artificial Sequence: Synthetic peptide
  N-term H or Acetyl
  MOD_RES (6)..(6): Modified Cys
  MOD_RES (8)..(8): Thr or Phospho-Thr
  MOD_RES (13)..(13): Leu or Nle (i.e. isomer of Leucine)
  See specification as filed for detailed description of substitutions and preferred embodiments
SAKSRCQTAPVPLPD

SEQ ID NO: 4862 - protein, 15 aa, Artificial Sequence
  Description of Artificial Sequence: Synthetic peptide
  N-term H or Acetyl
  MOD_RES (8)..(8): Thr or Phospho-Thr
  MOD_RES (10)..(10): Modified Cys
  MOD_RES (13)..(13): Leu or Nle (i.e. isomer of Leucine)
  See specification as filed for detailed description of substitutions and preferred embodiments
SAKSRLQTACVPLPD

SEQ ID NO: 4863 - protein, 10 aa, Artificial Sequence
  Description of Artificial Sequence: Synthetic peptide
  N-term H or Acetyl
  MOD_RES (6)..(6): Ser or Phospho-Ser
  MOD_RES (8)..(8): Modified Cys
  See specification as filed for detailed description of substitutions and preferred embodiments
SANLLSPCPA

SEQ ID NO: 4864 - protein, 18 aa, Artificial Sequence
  Description of Artificial Sequence: Synthetic peptide
  N-term H or Acetyl
  MOD_RES (5)..(5): Ser or Phospho-Ser
  MOD_RES (7)..(7): Modified Cys
  See specification as filed for detailed description of substitutions and preferred embodiments
SEGLSMCNYIGLINRIKK

SEQ ID NO: 4865 - protein, 15 aa, Artificial Sequence
  Description of Artificial Sequence: Synthetic peptide
  N-term H or Acetyl
  MOD_RES (8)..(8): Thr or Phospho-Thr
  MOD_RES (10)..(10): Modified Cys
  See specification as filed for detailed description of substitutions and preferred embodiments
SFITPPTTPCLRRHT

SEQ ID NO: 4866 - protein, 17 aa, Artificial Sequence
  Description of Artificial Sequence: Synthetic peptide
  N-term H or Acetyl
  MOD_RES (6)..(6): Modified Cys
  MOD_RES (8)..(8): Ser or Phospho-Ser
  See specification as filed for detailed description of substitutions and preferred embodiments
SGDEDCSSIADMDFSAL

SEQ ID NO: 4867 - protein, 20 aa, Artificial Sequence
  Description of Artificial Sequence: Synthetic peptide
  N-term H or Acetyl
  MOD_RES (8)..(8): Ser or Phospho-Ser
  MOD_RES (10)..(10): Modified Cys
  See specification as filed for detailed description of substitutions and preferred embodiments
SGDEDFSSICDMDFSALLSQ

SEQ ID NO: 4868 - protein, 15 aa, Artificial Sequence
  Description of Artificial Sequence: Synthetic peptide
  N-term H or Acetyl
  MOD_RES (5)..(5): Leu or Nle (i.e. isomer of Leucine)
  MOD_RES (7)..(7): Leu or Nle (i.e. isomer of Leucine)
  MOD_RES (8)..(8): Ser or Phospho-Ser
  MOD_RES (10)..(10): Modified Cys
  See specification as filed for detailed description of substitutions and preferred embodiments
SGDYLPLSPCSVSAP

SEQ ID NO: 4869 - protein, 15 aa, Artificial Sequence
  Description of Artificial Sequence: Synthetic peptide
  N-term H or Acetyl
  MOD_RES (4)..(4): Ser or Phospho-Ser
  MOD_RES (6)..(6): Modified Cys
  See specification as filed for detailed description of substitutions and preferred embodiments
SGLSRCDSPEPFGHY

SEQ ID NO: 4870 - protein, 15 aa, Artificial Sequence
  Description of Artificial Sequence: Synthetic peptide
  N-term H or Acetyl
  MOD_RES (6)..(6): Modified Cys
  MOD_RES (8)..(8): Ser or Phospho-Ser
  See specification as filed for detailed description of substitutions and preferred embodiments
SGLSRCDSPEPFGHY

SEQ ID NO: 4871 - protein, 15 aa, Artificial Sequence
  Description of Artificial Sequence: Synthetic peptide
  N-term H or Acetyl
  MOD_RES (8)..(8): Ser or Phospho-Ser
  MOD_RES (10)..(10): Modified Cys
  See specification as filed for detailed description of substitutions and preferred embodiments
SGLSRRDSPCPFGHY

SEQ ID NO: 4872 - protein, 13 aa, Artificial Sequence
  Description of Artificial Sequence: Synthetic peptide
  N-term H or Acetyl
  MOD_RES (5)..(5): Modified Cys
  MOD_RES (7)..(7): Ser or Phospho-Ser
  MOD_RES (8)..(8): Leu or Nle (i.e. isomer of Leucine)
  See specification as filed for detailed description of substitutions and preferred embodiments
SGQLCDSLANSFV

SEQ ID NO: 4873 - protein, 13 aa, Artificial Sequence
  Description of Artificial Sequence: Synthetic peptide
  N-term H or Acetyl
  MOD_RES (7)..(7): Ser or Phospho-Ser
  MOD_RES (8)..(8): Leu or Nle (i.e. isomer of Leucine)
  MOD_RES (9)..(9): Modified Cys
  See specification as filed for detailed description of substitutions and preferred embodiments
SGQLIDSLCNSFV

SEQ ID NO: 4874 - protein, 14 aa, Artificial Sequence
  Description of Artificial Sequence: Synthetic peptide
  N-term H or Acetyl
  MOD_RES (8)..(8): Leu or Nle (i.e. isomer of Leucine)
  MOD_RES (11)..(11): Ser or Phospho-Ser
  MOD_RES (13)..(13): Modified Cys
  See specification as filed for detailed description of substitutions and preferred embodiments
SGQLIDSLANSFCG

SEQ ID NO: 4875 - protein, 13 aa, Artificial Sequence
  Description of Artificial Sequence: Synthetic peptide
  N-term H or Acetyl
  MOD_RES (8)..(8): Leu or Nle (i.e. isomer of Leucine)
  MOD_RES (9)..(9): Modified Cys
  MOD_RES (11)..(11): Ser or Phospho-Ser
  See specification as filed for detailed description of substitutions and preferred embodiments
SGQLIDSLCNSFV

SEQ ID NO: 4876 - protein, 15 aa, Artificial Sequence
  Description of Artificial Sequence: Synthetic peptide
  N-term H or Acetyl
  MOD_RES (6)..(6): Modified Cys
  MOD_RES (8)..(8): Ser or Phospho-Ser
  See specification as filed for detailed description of substitutions and preferred embodiments
SGRPRCTSFAESSKP

SEQ ID NO: 4877 - protein, 15 aa, Artificial Sequence
  Description of Artificial Sequence: Synthetic peptide
  N-term H or Acetyl
  MOD_RES (8)..(8): Ser or Phospho-Ser
  MOD_RES (10)..(10): Modified Cys
  See specification as filed for detailed description of substitutions and preferred embodiments
SGRPRTTSFCESSKP

SEQ ID NO: 4878 - protein, 15 aa, Artificial Sequence
  Description of Artificial Sequence: Synthetic peptide
  N-term H or Acetyl
  MOD_RES (6)..(6): Modified Cys
  MOD_RES (8)..(8): Thr or Phospho-Thr
  See specification as filed for detailed description of substitutions and preferred embodiments
SGVEVCVTPTRTEII

SEQ ID NO: 4879 - protein, 15 aa, Artificial Sequence
  Description of Artificial Sequence: Synthetic peptide
  N-term H or Acetyl
  MOD_RES (8)..(8): Thr or Phospho-Thr
  MOD_RES (10)..(10): Modified Cys
  See specification as filed for detailed description of substitutions and preferred embodiments
SGVEVRVTPCRTEII

SEQ ID NO: 4880 - protein, 15 aa, Artificial Sequence
  Description of Artificial Sequence: Synthetic peptide
  N-term H or Acetyl
  MOD_RES (10)..(10): Modified Cys
  MOD_RES (12)..(12): Thr or Phospho-Thr
  See specification as filed for detailed description of substitutions and preferred embodiments
SGVEVRVTPCRTEII

SEQ ID NO: 4881 - protein, 15 aa, Artificial Sequence
  Description of Artificial Sequence: Synthetic peptide
  N-term H or Acetyl
  MOD_RES (4)..(4): Ser or Phospho-Ser
  MOD_RES (6)..(6): Modified Cys
  MOD_RES (14)..(14): Leu or Nle (i.e. isomer of Leucine)
  See specification as filed for detailed description of substitutions and preferred embodiments
SIKSECISPPRDRLT

SEQ ID NO: 4882 - protein, 15 aa, Artificial Sequence
  Description of Artificial Sequence: Synthetic peptide
  N-term H or Acetyl
  MOD_RES (6)..(6): Modified Cys
  MOD_RES (8)..(8): Ser or Phospho-Ser
  MOD_RES (14)..(14): Leu or Nle (i.e. isomer of Leucine)
  See specification as filed for detailed description of substitutions and preferred embodiments
SIKSECISPPRDRLT

SEQ ID NO: 4883 - protein, 15 aa, Artificial Sequence
  Description of Artificial Sequence: Synthetic peptide
  N-term H or Acetyl
  MOD_RES (8)..(8): Ser or Phospho-Ser
  MOD_RES (10)..(10): Modified Cys
  MOD_RES (14)..(14): Leu or Nle (i.e. isomer of Leucine)
  See specification as filed for detailed description of substitutions and preferred embodiments
SIKSEPISPCRDRLT

SEQ ID NO: 4884 - protein, 18 aa, Artificial Sequence
  Description of Artificial Sequence: Synthetic peptide
  N-term H or Acetyl
  MOD_RES (6)..(6): Modified Cys
  MOD_RES (8)..(8): Ser or Phospho-Ser
  See specification as filed for detailed description of substitutions and preferred embodiments
SIMQQCDSPHVVKYYKKK

SEQ ID NO: 4885 - protein, 15 aa, Artificial Sequence
  Description of Artificial Sequence: Synthetic peptide
  N-term H or Acetyl
  MOD_RES (3)..(3): Ser or Phospho-Ser
  MOD_RES (5)..(5): Modified Cys
  See specification as filed for detailed description of substitutions and preferred embodiments
SKSSCNGTSGDREDK

SEQ ID NO: 4886 - protein, 20 aa, Artificial Sequence
  Description of Artificial Sequence: Synthetic peptide
  N-term H or Acetyl
  MOD_RES (4)..(4): Modified Cys
  MOD_RES (6)..(6): Ser or Phospho-Ser
  See specification as filed for detailed description of substitutions and preferred embodiments
SLDCSSLSLSLSSANSLYDD

SEQ ID NO: 4887 - protein, 20 aa, Artificial Sequence
  Description of Artificial Sequence: Synthetic peptide
  N-term H or Acetyl
  MOD_RES (8)..(8): Ser or Phospho-Ser
  MOD_RES (10)..(10): Modified Cys
  See specification as filed for detailed description of substitutions and preferred embodiments
SLDSSSLSLCLSSANSLYDD

SEQ ID NO: 4888 - protein, 20 aa, Artificial Sequence
  Description of Artificial Sequence: Synthetic peptide
  N-term H or Acetyl
  MOD_RES (10)..(10): Modified Cys
  MOD_RES (12)..(12): Ser or Phospho-Ser
  See specification as filed for detailed description of substitutions and preferred embodiments
SLDSSSLSLCLSSANSLYDD

SEQ ID NO: 4889 - protein, 15 aa, Artificial Sequence
  Description of Artificial Sequence: Synthetic peptide
  N-term H or Acetyl
  MOD_RES (6)..(6): Modified Cys
  MOD_RES (8)..(8): Ser or Phospho-Ser
  See specification as filed for detailed description of substitutions and preferred embodiments
SNGRRCRSPTQSFRF

SEQ ID NO: 4890 - protein, 15 aa, Artificial Sequence
  Description of Artificial Sequence: Synthetic peptide
  N-term H or Acetyl
  MOD_RES (8)..(8): Ser or Phospho-Ser
  MOD_RES (10)..(10): Modified Cys
  See specification as filed for detailed description of substitutions and preferred embodiments
SNGRRKRSPCQSFRF

SEQ ID NO: 4891 - protein, 15 aa, Artificial Sequence
  Description of Artificial Sequence: Synthetic peptide
  N-term H or Acetyl
  MOD_RES (10)..(10): Modified Cys
  MOD_RES (12)..(12): Ser or Phospho-Ser
  See specification as filed for detailed description of substitutions and preferred embodiments
SNGRRKRSPCQSFRF

SEQ ID NO: 4892 - protein, 15 aa, Artificial Sequence
  Description of Artificial Sequence: Synthetic peptide
  N-term H or Acetyl
  MOD_RES (8)..(8): Ser or Phospho-Ser
  MOD_RES (10)..(10): Modified Cys
  See specification as filed for detailed description of substitutions and preferred embodiments
SNSLKKSSACLKKIL

SEQ ID NO: 4893 - protein, 15 aa, Artificial Sequence
  Description of Artificial Sequence: Synthetic peptide
  N-term H or Acetyl
  MOD_RES (3)..(3): Thr or Phospho-Thr
  MOD_RES (6)..(6): Modified Cys
  MOD_RES (11)..(11): Leu or Nle (i.e. isomer of Leucine)
  See specification as filed for detailed description of substitutions and preferred embodiments
SNTGQCISPGLKRRI

SEQ ID NO: 4894 - protein, 15 aa, Artificial Sequence
  Description of Artificial Sequence: Synthetic peptide
  N-term H or Acetyl
  MOD_RES (8)..(8): Ser or Phospho-Ser
  MOD_RES (10)..(10): Modified Cys
  MOD_RES (11)..(11): Leu or Nle (i.e. isomer of Leucine)
  See specification as filed for detailed description of substitutions and preferred embodiments
SNTGQAISPCLKRRI

SEQ ID NO: 4895 - protein, 15 aa, Artificial Sequence
  Description of Artificial Sequence: Synthetic peptide
  N-term H or Acetyl
  MOD_RES (8)..(8): Ser or Phospho-Ser
  MOD_RES (11)..(11): Modified Cys
  See specification as filed for detailed description of substitutions and preferred embodiments
SNTGQAISPGCKRRI

SEQ ID NO: 4896 - protein, 15 aa, Artificial Sequence
  Description of Artificial Sequence: Synthetic peptide
  N-term H or Acetyl
  MOD_RES (6)..(6): Modified Cys
  MOD_RES (8)..(8): Ser or Phospho-Ser
  MOD_RES (11)..(11): Leu or Nle (i.e. isomer of Leucine)
  See specification as filed for detailed description of substitutions and preferred embodiments
SNTGQCISPGLKRRI

SEQ ID NO: 4897 - protein, 14 aa, Artificial Sequence
  Description of Artificial Sequence: Synthetic peptide
  N-term H or Acetyl
  MOD_RES (5)..(5): Modified Cys
  MOD_RES (7)..(7): Ser or Phospho-Ser
  See specification as filed for detailed description of substitutions and preferred embodiments
SPARCSSYSEANEP

SEQ ID NO: 4898 - protein, 15 aa, Artificial Sequence
  Description of Artificial Sequence: Synthetic peptide
  N-term H or Acetyl
  MOD_RES (8)..(8): Ser or Phospho-Ser
  MOD_RES (10)..(10): Modified Cys
  See specification as filed for detailed description of substitutions and preferred embodiments
SPLSDPSSPCASEDF

SEQ ID NO: 4899 - protein, 15 aa, Artificial Sequence
  Description of Artificial Sequence: Synthetic peptide
  N-term H or Acetyl
  MOD_RES (10)..(10): Modified Cys
  MOD_RES (12)..(12): Ser or Phospho-Ser
  See specification as filed for detailed description of substitutions and preferred embodiments
SPLSDPSSPCASEDF

SEQ ID NO: 4900 - protein, 20 aa, Artificial Sequence
  Description of Artificial Sequence: Synthetic peptide
  N-term H or Acetyl
  MOD_RES (4)..(4): Modified Cys
  MOD_RES (6)..(6): Ser or Phospho-Ser
  See specification as filed for detailed description of substitutions and preferred embodiments
SPSCRSRSRSRSRSPGRPSK

SEQ ID NO: 4901 - protein, 20 aa, Artificial Sequence
  Description of Artificial Sequence: Synthetic peptide
  N-term H or Acetyl
  MOD_RES (6)..(6): Ser or Phospho-Ser
  MOD_RES (8)..(8): Modified Cys
  See specification as filed for detailed description of substitutions and preferred embodiments
SPSRRSRCRSRSRSPGRPSK

SEQ ID NO: 4902 - protein, 20 aa, Artificial Sequence
  Description of Artificial Sequence: Synthetic peptide
  N-term H or Acetyl
  MOD_RES (8)..(8): Modified Cys
  MOD_RES (10)..(10): Ser or Phospho-Ser
  See specification as filed for detailed description of substitutions and preferred embodiments
SPSRRSRCRSRSRSPGRPSK

SEQ ID NO: 4903 - protein, 20 aa, Artificial Sequence
  Description of Artificial Sequence: Synthetic peptide
  N-term H or Acetyl
  MOD_RES (8)..(8): Ser or Phospho-Ser
  MOD_RES (10)..(10): Modified Cys
  See specification as filed for detailed description of substitutions and preferred embodiments
SPSRRSRSRCRSRSPGRPSK

SEQ ID NO: 4904 - protein, 20 aa, Artificial Sequence
  Description of Artificial Sequence: Synthetic peptide
  N-term H or Acetyl
  MOD_RES (10)..(10): Modified Cys
  MOD_RES (12)..(12): Ser or Phospho-Ser
  See specification as filed for detailed description of substitutions and preferred embodiments
SPSRRSRSRCRSRSPGRPSK

SEQ ID NO: 4905 - protein, 20 aa, Artificial Sequence
  Description of Artificial Sequence: Synthetic peptide
  N-term H or Acetyl
  MOD_RES (10)..(10): Ser or Phospho-Ser
  MOD_RES (12)..(12): Modified Cys
  See specification as filed for detailed description of substitutions and preferred embodiments
SPSRRSRSRSRCRSPGRPSK

SEQ ID NO: 4906 - protein, 20 aa, Artificial Sequence
  Description of Artificial Sequence: Synthetic peptide
  N-term H or Acetyl
  MOD_RES (12)..(12): Modified Cys
  MOD_RES (14)..(14): Ser or Phospho-Ser
  See specification as filed for detailed description of substitutions and preferred embodiments
SPSRRSRSRSRCRSPGRPSK

SEQ ID NO: 4907 - protein, 20 aa, Artificial Sequence
  Description of Artificial Sequence: Synthetic peptide
  N-term H or Acetyl
  MOD_RES (12)..(12): Ser or Phospho-Ser
  MOD_RES (14)..(14): Modified Cys
  See specification as filed for detailed description of substitutions and preferred embodiments
SPSRRSRSRSRSRCPGRPSK

SEQ ID NO: 4908 - protein, 20 aa, Artificial Sequence
  Description of Artificial Sequence: Synthetic peptide
  N-term H or Acetyl
  MOD_RES (14)..(14): Ser or Phospho-Ser
  MOD_RES (16)..(16): Modified Cys
  See specification as filed for detailed description of substitutions and preferred embodiments
SPSRRSRSRSRSRSPCRPSK

SEQ ID NO: 4909 - protein, 14 aa, Artificial Sequence
  Description of Artificial Sequence: Synthetic peptide
  N-term H or Acetyl
  MOD_RES (3)..(3): Modified Cys
  MOD_RES (5)..(5): Ser or Phospho-Ser
  See specification as filed for detailed description of substitutions and preferred embodiments
SRCLSVSSLPGLED

SEQ ID NO: 4910 - protein, 14 aa, Artificial Sequence
  Description of Artificial Sequence: Synthetic peptide
  N-term H or Acetyl
  MOD_RES (3)..(3): Modified Cys
  MOD_RES (5)..(5): Ser or Phospho-Ser
  MOD_RES (9)..(9): Ser or Phospho-Ser
  See specification as filed for detailed description of substitutions and preferred embodiments
SRCSSPHQSEDEEE

SEQ ID NO: 4911 - protein, 15 aa, Artificial Sequence
  Description of Artificial Sequence: Synthetic peptide
  N-term H or Acetyl
  MOD_RES (8)..(8): Thr or Phospho-Thr
  MOD_RES (10)..(10): Modified Cys
  See specification as filed for detailed description of substitutions and preferred embodiments
SRDPVARTSCLQTPA

SEQ ID NO: 4912 - protein, 15 aa, Artificial Sequence
  Description of Artificial Sequence: Synthetic peptide
  N-term H or Acetyl
  MOD_RES (6)..(6): Modified Cys
  MOD_RES (8)..(8): Ser or Phospho-Ser
  See specification as filed for detailed description of substitutions and preferred embodiments
SRLRDCPSAPLEAPE

SEQ ID NO: 4913 - protein, 15 aa, Artificial Sequence
  Description of Artificial Sequence: Synthetic peptide
  N-term H or Acetyl
  MOD_RES (4)..(4): Ser or Phospho-Ser
  MOD_RES (6)..(6): Modified Cys
  See specification as filed for detailed description of substitutions and preferred embodiments
SRRSGCSSPSYVAVT

SEQ ID NO: 4914 - protein, 15 aa, Artificial Sequence
  Description of Artificial Sequence: Synthetic peptide
  N-term H or Acetyl
  MOD_RES (6)..(6): Modified Cys
  MOD_RES (8)..(8): Ser or Phospho-Ser
  See specification as filed for detailed description of substitutions and preferred embodiments
SRRSGCSSPSYVAVT

SEQ ID NO: 4915 - protein, 15 aa, Artificial Sequence
  Description of Artificial Sequence: Synthetic peptide
  N-term H or Acetyl
  MOD_RES (8)..(8): Ser or Phospho-Ser
  MOD_RES (10)..(10): Modified Cys
  See specification as filed for detailed description of substitutions and preferred embodiments
SRRSGLSSPCYVAVT

SEQ ID NO: 4916 - protein, 15 aa, Artificial Sequence
  Description of Artificial Sequence: Synthetic peptide
  N-term H or Acetyl
  MOD_RES (8)..(8): Thr or Phospho-Thr
  MOD_RES (10)..(10): Modified Cys
  See specification as filed for detailed description of substitutions and preferred embodiments
SRSHSAKTPCFSVQS

SEQ ID NO: 4917 - protein, 15 aa, Artificial Sequence
  Description of Artificial Sequence: Synthetic peptide
  N-term H or Acetyl
  MOD_RES (8)..(8): Thr or Phospho-Thr
  MOD_RES (11)..(11): Modified Cys
  See specification as filed for detailed description of substitutions and preferred embodiments
SRSHSAKTPGCSVQS

SEQ ID NO: 4918 - protein, 15 aa, Artificial Sequence
  Description of Artificial Sequence: Synthetic peptide
  N-term H or Acetyl
  MOD_RES (10)..(10): Modified Cys
  MOD_RES (12)..(12): Ser or Phospho-Ser
  See specification as filed for detailed description of substitutions and preferred embodiments
SRSHSAKTPCFSVQS

SEQ ID NO: 4919 - protein, 15 aa, Artificial Sequence
  Description of Artificial Sequence: Synthetic peptide
  N-term H or Acetyl
  MOD_RES (6)..(6): Modified Cys
  MOD_RES (8)..(8): Thr or Phospho-Thr
  See specification as filed for detailed description of substitutions and preferred embodiments
SRSHSCKTPGFSVQS

SEQ ID NO: 4920 - protein, 16 aa, Artificial Sequence
  Description of Artificial Sequence: Synthetic peptide
  N-term H or Acetyl
  MOD_RES (5)..(5): Ser or Phospho-Ser
  MOD_RES (7)..(7): Modified Cys
  See specification as filed for detailed description of substitutions and preferred embodiments
SRSRSRCRAPGRPSKG

SEQ ID NO: 4921 - protein, 16 aa, Artificial Sequence
  Description of Artificial Sequence: Synthetic peptide
  N-term H or Acetyl
  MOD_RES (5)..(5): Ser or Phospho-Ser
  MOD_RES (7)..(7): Modified Cys
  See specification as filed for detailed description of substitutions and preferred embodiments
SRSRSRCRGPGRPSKG

SEQ ID NO: 4922 - protein, 16 aa, Artificial Sequence
  Description of Artificial Sequence: Synthetic peptide
  N-term H or Acetyl
  MOD_RES (5)..(5): Ser or Phospho-Ser
  MOD_RES (7)..(7): Modified Cys
  See specification as filed for detailed description of substitutions and preferred embodiments
SRSRSRCRSPGRPSKG

SEQ ID NO: 4923 - protein, 20 aa, Artificial Sequence
  Description of Artificial Sequence: Synthetic peptide
  N-term H or Acetyl
  MOD_RES (11)..(11): Ser or Phospho-Ser
  MOD_RES (13)..(13): Modified Cys
  See specification as filed for detailed description of substitutions and preferred embodiments
SRSRSNSRSRSYCPRRSRGS

SEQ ID NO: 4924 - protein, 20 aa, Artificial Sequence
  Description of Artificial Sequence: Synthetic peptide
  N-term H or Acetyl
  MOD_RES (13)..(13): Ser or Phospho-Ser
  MOD_RES (15)..(15): Modified Cys
  See specification as filed for detailed description of substitutions and preferred embodiments
SRSRSNSRSRSYSPCRSRGS

SEQ ID NO: 4925 - protein, 20 aa, Artificial Sequence
  Description of Artificial Sequence: Synthetic peptide
  N-term H or Acetyl
  MOD_RES (15)..(15): Modified Cys
  MOD_RES (17)..(17): Ser or Phospho-Ser
  See specification as filed for detailed description of substitutions and preferred embodiments
SRSRSNSRSRSYSPCRSRGS

SEQ ID NO: 4926 - protein, 16 aa, Artificial Sequence
  Description of Artificial Sequence: Synthetic peptide
  N-term H or Acetyl
  MOD_RES (7)..(7): Modified Cys
  MOD_RES (9)..(9): Ser or Phospho-Ser
  See specification as filed for detailed description of substitutions and preferred embodiments
SRSRSRCRSPGRPSKG

SEQ ID NO: 4927 - protein, 20 aa, Artificial Sequence
  Description of Artificial Sequence: Synthetic peptide
  N-term H or Acetyl
  MOD_RES (15)..(15): Ser or Phospho-Ser
  MOD_RES (17)..(17): Modified Cys
  See specification as filed for detailed description of substitutions and preferred embodiments
SRSRSRSNSRSRSYSPCRSR

SEQ ID NO: 4928 - protein, 20 aa, Artificial Sequence
  Description of Artificial Sequence: Synthetic peptide
  N-term H or Acetyl
  MOD_RES (17)..(17): Modified Cys
  MOD_RES (19)..(19): Ser or Phospho-Ser
  See specification as filed for detailed description of substitutions and preferred embodiments
SRSRSRSNSRSRSYSPCRSR

SEQ ID NO: 4929 - protein, 17 aa, Artificial Sequence
  Description of Artificial Sequence: Synthetic peptide
  N-term H or Acetyl
  MOD_RES (9)..(9): Ser or Phospho-Ser
  MOD_RES (11)..(11): Modified Cys
  See specification as filed for detailed description of substitutions and preferred embodiments
SRSRSRSRSPCRPSKGR

SEQ ID NO: 4930 - protein, 16 aa, Artificial Sequence
  Description of Artificial Sequence: Synthetic peptide
  N-term H or Acetyl
  MOD_RES (9)..(9): Ser or Phospho-Ser
  MOD_RES (11)..(11): Modified Cys
  See specification as filed for detailed description of substitutions and preferred embodiments
SRSRSRSRSPCRPSKG

SEQ ID NO: 4931 - protein, 20 aa, Artificial Sequence
  Description of Artificial Sequence: Synthetic peptide
  N-term H or Acetyl
  MOD_RES (15)..(15): Ser or Phospho-Ser
  MOD_RES (17)..(17): Modified Cys
  See specification as filed for detailed description of substitutions and preferred embodiments
SRSRSRSRSNSRSRSYCPRR

SEQ ID NO: 4932 - protein, 20 aa, Artificial Sequence
  Description of Artificial Sequence: Synthetic peptide
  N-term H or Acetyl
  MOD_RES (17)..(17): Ser or Phospho-Ser
  MOD_RES (19)..(19): Modified Cys
  See specification as filed for detailed description of substitutions and preferred embodiments
SRSRSRSRSNSRSRSYSPCR

SEQ ID NO: 4933 - protein, 13 aa, Artificial Sequence
  Description of Artificial Sequence: Synthetic peptide
  N-term H or Acetyl
  MOD_RES (8)..(8): Ser or Phospho-Ser
  MOD_RES (10)..(10): Modified Cys
  See specification as filed for detailed description of substitutions and preferred embodiments
SSKIRRLSACKQQ

SEQ ID NO: 4934 - protein, 23 aa, Artificial Sequence
  Description of Artificial Sequence: Synthetic peptide
  N-term H or Acetyl
  MOD_RES (18)..(18): Thr or Phospho-Thr
  MOD_RES (20)..(20): Modified Cys
  See specification as filed for detailed description of substitutions and preferred embodiments
SSKRAKAKTTKKRPQRATSCVFS

SEQ ID NO: 4935 - protein, 23 aa, Artificial Sequence
  Description of Artificial Sequence: Synthetic peptide
  N-term H or Acetyl
  MOD_RES (19)..(19): Ser or Phospho-Ser
  MOD_RES (21)..(21): Modified Cys
  See specification as filed for detailed description of substitutions and preferred embodiments
SSKRAKAKTTKKRPQRATSNCFS

SEQ ID NO: 4936 - protein, 23 aa, Artificial Sequence
  Description of Artificial Sequence: Synthetic peptide
  N-term H or Acetyl
  MOD_RES (21)..(21): Modified Cys
  MOD_RES (23)..(23): Ser or Phospho-Ser
  See specification as filed for detailed description of substitutions and preferred embodiments
SSKRAKAKTTKKRPQRATSNCFS

SEQ ID NO: 4937 - protein, 15 aa, Artificial Sequence
  Description of Artificial Sequence: Synthetic peptide
  N-term H or Acetyl
  MOD_RES (6)..(6): Modified Cys
  MOD_RES (8)..(8): Thr or Phospho-Thr
  See specification as filed for detailed description of substitutions and preferred embodiments
SSLETCSTQELYSIP

SEQ ID NO: 4938 - protein, 15 aa, Artificial Sequence
  Description of Artificial Sequence: Synthetic peptide
  N-term H or Acetyl
  MOD_RES (5)..(5): Modified Cys
  MOD_RES (7)..(7): Ser or Phospho-Ser
  See specification as filed for detailed description of substitutions and preferred embodiments
SSPSCRSRSRSRSRS

SEQ ID NO: 4939 - protein, 15 aa, Artificial Sequence
  Description of Artificial Sequence: Synthetic peptide
  N-term H or Acetyl
  MOD_RES (7)..(7): Modified Cys
  MOD_RES (9)..(9): Ser or Phospho-Ser
  See specification as filed for detailed description of substitutions and preferred embodiments
SSPSRRCRSRSRSRS

SEQ ID NO: 4940 - protein, 15 aa, Artificial Sequence
  Description of Artificial Sequence: Synthetic peptide
  N-term H or Acetyl
  MOD_RES (7)..(7): Ser or Phospho-Ser
  MOD_RES (9)..(9): Modified Cys
  See specification as filed for detailed description of substitutions and preferred embodiments
SSPSRRSRCRSRSRS

SEQ ID NO: 4941 - protein, 15 aa, Artificial Sequence
  Description of Artificial Sequence: Synthetic peptide
  N-term H or Acetyl
  MOD_RES (9)..(9): Modified Cys
  MOD_RES (11)..(11): Ser or Phospho-Ser
  See specification as filed for detailed description of substitutions and preferred embodiments
SSPSRRSRCRSRSRS

SEQ ID NO: 4942 - protein, 15 aa, Artificial Sequence
  Description of Artificial Sequence: Synthetic peptide
  N-term H or Acetyl
  MOD_RES (11)..(11): Ser or Phospho-Ser
  MOD_RES (13)..(13): Modified Cys
  See specification as filed for detailed description of substitutions and preferred embodiments
SSPSRRSRSRSRCRA

SEQ ID NO: 4943 - protein, 15 aa, Artificial Sequence
  Description of Artificial Sequence: Synthetic peptide
  N-term H or Acetyl
  MOD_RES (11)..(11): Ser or Phospho-Ser
  MOD_RES (13)..(13): Modified Cys
  See specification as filed for detailed description of substitutions and preferred embodiments
SSPSRRSRSRSRCRG

SEQ ID NO: 4944 - protein, 15 aa, Artificial Sequence
  Description of Artificial Sequence: Synthetic peptide
  N-term H or Acetyl
  MOD_RES (11)..(11): Ser or Phospho-Ser
  MOD_RES (13)..(13): Modified Cys
  See specification as filed for detailed description of substitutions and preferred embodiments
SSPSRRSRSRSRCRS

SEQ ID NO: 4945 - protein, 15 aa, Artificial Sequence
  Description of Artificial Sequence: Synthetic peptide
  N-term H or Acetyl
  MOD_RES (13)..(13): Modified Cys
  MOD_RES (15)..(15): Ser or Phospho-Ser
  See specification as filed for detailed description of substitutions and preferred embodiments
SSPSRRSRSRSRCRS

SEQ ID NO: 4946 - protein, 15 aa, Artificial Sequence
  Description of Artificial Sequence: Synthetic peptide
  N-term H or Acetyl
  MOD_RES (13)..(13): Ser or Phospho-Ser
  MOD_RES (15)..(15): Modified Cys
  See specification as filed for detailed description of substitutions and preferred embodiments
SSPSRRSRSRSRSRC

SEQ ID NO: 4947 - protein, 23 aa, Artificial Sequence
  Description of Artificial Sequence: Synthetic peptide
  N-term H or Acetyl
  MOD_RES (15)..(15): Ser or Phospho-Ser
  MOD_RES (17)..(17): Modified Cys
  See specification as filed for detailed description of substitutions and preferred embodiments
SSPSRRSRSRSRSRSPCRPSKGR

SEQ ID NO: 4948 - protein, 22 aa, Artificial Sequence
  Description of Artificial Sequence: Synthetic peptide
  N-term H or Acetyl
  MOD_RES (15)..(15): Ser or Phospho-Ser
  MOD_RES (17)..(17): Modified Cys
  See specification as filed for detailed description of substitutions and preferred embodiments
SSPSRRSRSRSRSRSPCRPSKG

SEQ ID NO: 4949 - protein, 15 aa, Artificial Sequence
  Description of Artificial Sequence: Synthetic peptide
  N-term H or Acetyl
  MOD_RES (8)..(8): Ser or Phospho-Ser
  MOD_RES (10)..(10): Modified Cys
  See specification as filed for detailed description of substitutions and preferred embodiments
STPSEPLSPCSSLGE

SEQ ID NO: 4950 - protein, 15 aa, Artificial Sequence
  Description of Artificial Sequence: Synthetic peptide
  N-term H or Acetyl
  MOD_RES (10)..(10): Modified Cys
  MOD_RES (12)..(12): Ser or Phospho-Ser
  See specification as filed for detailed description of substitutions and preferred embodiments
STPSEPLSPCSSLGE

SEQ ID NO: 4951 - protein, 18 aa, Artificial Sequence
  Description of Artificial Sequence: Synthetic peptide
  N-term H or Acetyl
  MOD_RES (6)..(6): Modified Cys
  MOD_RES (8)..(8): Ser or Phospho-Ser
  See specification as filed for detailed description of substitutions and preferred embodiments
STSVTCHSPSSPVGSKKK

SEQ ID NO: 4952 - protein, 15 aa, Artificial Sequence
  Description of Artificial Sequence: Synthetic peptide
  N-term H or Acetyl
  MOD_RES (8)..(8): Ser or Phospho-Ser
  MOD_RES (10)..(10): Modified Cys
  See specification as filed for detailed description of substitutions and preferred embodiments
SYYGRDRSPCRRATA

SEQ ID NO: 4953 - protein, 15 aa, Artificial Sequence
  Description of Artificial Sequence: Synthetic peptide
  N-term H or Acetyl
  MOD_RES (10)..(10): Modified Cys
  MOD_RES (12)..(12): Thr or Phospho-Thr
  See specification as filed for detailed description of substitutions and preferred embodiments
TDGEDADYTCFTNQQ

SEQ ID NO: 4954 - protein, 15 aa, Artificial Sequence
  Description of Artificial Sequence: Synthetic peptide
  N-term H or Acetyl
  MOD_RES (6)..(6): Modified Cys
  MOD_RES (8)..(8): Ser or Phospho-Ser
  See specification as filed for detailed description of substitutions and preferred embodiments
TEERLCSSPVYEDAA

SEQ ID NO: 4955 - protein, 15 aa, Artificial Sequence
  Description of Artificial Sequence: Synthetic peptide
  N-term H or Acetyl
  MOD_RES (4)..(4): Ser or Phospho-Ser
  MOD_RES (6)..(6): Modified Cys
  See specification as filed for detailed description of substitutions and preferred embodiments
TFDSLCSSPSSATPH

SEQ ID NO: 4956 - protein, 15 aa, Artificial Sequence
  Description of Artificial Sequence: Synthetic peptide
  N-term H or Acetyl
  MOD_RES (6)..(6): Modified Cys
  MOD_RES (8)..(8): Ser or Phospho-Ser
  See specification as filed for detailed description of substitutions and preferred embodiments
TFDSLCSSPSSATPH

SEQ ID NO: 4957 - protein, 15 aa, Artificial Sequence
  Description of Artificial Sequence: Synthetic peptide
  N-term H or Acetyl
  MOD_RES (8)..(8): Ser or Phospho-Ser
  MOD_RES (10)..(10): Modified Cys
  See specification as filed for detailed description of substitutions and preferred embodiments
TFDSLPSSPCSATPH

SEQ ID NO: 4958 - protein, 13 aa, Artificial Sequence
  Description of Artificial Sequence: Synthetic peptide
  N-term H or Acetyl
  MOD_RES (8)..(8): Thr or Phospho-Thr
  MOD_RES (10)..(10): Modified Cys
  See specification as filed for detailed description of substitutions and preferred embodiments
TFGNKLDTFCGSP

SEQ ID NO: 4959 - protein, 13 aa, Artificial Sequence
  Description of Artificial Sequence: Synthetic peptide
  N-term H or Acetyl
  MOD_RES (10)..(10): Modified Cys
  MOD_RES (12)..(12): Ser or Phospho-Ser
  See specification as filed for detailed description of substitutions and preferred embodiments
TFGNKLDTFCGSP

SEQ ID NO: 4960 - protein, 15 aa, Artificial Sequence
  Description of Artificial Sequence: Synthetic peptide
  N-term H or Acetyl
  MOD_RES (10)..(10): Modified Cys
  MOD_RES (12)..(12): Ser or Phospho-Ser
  See specification as filed for detailed description of substitutions and preferred embodiments
TFLPVPEYICQSVPK

SEQ ID NO: 4961 - protein, 15 aa, Artificial Sequence
  Description of Artificial Sequence: Synthetic peptide
  N-term H or Acetyl
  MOD_RES (8)..(8): Thr or Phospho-Thr
  MOD_RES (10)..(10): Modified Cys
  See specification as filed for detailed description of substitutions and preferred embodiments
TKLKPPRTPCPPSRK

SEQ ID NO: 4962 - protein, 15 aa, Artificial Sequence
  Description of Artificial Sequence: Synthetic peptide
  N-term H or Acetyl
  MOD_RES (6)..(6): Modified Cys
  MOD_RES (8)..(8): Ser or Phospho-Ser
  See specification as filed for detailed description of substitutions and preferred embodiments
TPPEECPSPSASSLG

SEQ ID NO: 4963 - protein, 15 aa, Artificial Sequence
  Description of Artificial Sequence: Synthetic peptide
  N-term H or Acetyl
  MOD_RES (8)..(8): Ser or Phospho-Ser
  MOD_RES (10)..(10): Modified Cys
  See specification as filed for detailed description of substitutions and preferred embodiments
TPPEELPSPCASSLG

SEQ ID NO: 4964 - protein, 15 aa, Artificial Sequence
  Description of Artificial Sequence: Synthetic peptide
  N-term H or Acetyl
  MOD_RES (10)..(10): Modified Cys
  MOD_RES (12)..(12): Ser or Phospho-Ser
  See specification as filed for detailed description of substitutions and preferred embodiments
TPPEELPSPCASSLG

SEQ ID NO: 4965 - protein, 15 aa, Artificial Sequence
  Description of Artificial Sequence: Synthetic peptide
  N-term H or Acetyl
  MOD_RES (8)..(8): Ser or Phospho-Ser
  MOD_RES (10)..(10): Modified Cys
  See specification as filed for detailed description of substitutions and preferred embodiments
TPPQEHISPCITNEV

SEQ ID NO: 4966 - protein, 15 aa, Artificial Sequence
  Description of Artificial Sequence: Synthetic peptide
  N-term H or Acetyl
  MOD_RES (10)..(10): Modified Cys
  MOD_RES (12)..(12): Thr or Phospho-Thr
  See specification as filed for detailed description of substitutions and preferred embodiments
TPPQEHISPCITNEV

SEQ ID NO: 4967 - protein, 15 aa, Artificial Sequence
  Description of Artificial Sequence: Synthetic peptide
  N-term H or Acetyl
  MOD_RES (6)..(6): Modified Cys
  MOD_RES (8)..(8): Thr or Phospho-Thr
  See specification as filed for detailed description of substitutions and preferred embodiments
TPVVSCATPTLPGQG

SEQ ID NO: 4968 - protein, 18 aa, Artificial Sequence
  Description of Artificial Sequence: Synthetic peptide
  N-term H or Acetyl
  MOD_RES (4)..(4): Thr or Phospho-Thr
  MOD_RES (6)..(6): Modified Cys
  See specification as filed for detailed description of substitutions and preferred embodiments
TTGTKCNTPTSSVPSKKK

SEQ ID NO: 4969 - protein, 18 aa, Artificial Sequence
  Description of Artificial Sequence: Synthetic peptide
  N-term H or Acetyl
  MOD_RES (6)..(6): Modified Cys
  MOD_RES (8)..(8): Thr or Phospho-Thr
  See specification as filed for detailed description of substitutions and preferred embodiments
TTGTKCNTPTSSVPSKKK

SEQ ID NO: 4970 - protein, 15 aa, Artificial Sequence
  Description of Artificial Sequence: Synthetic peptide
  N-term H or Acetyl
  MOD_RES (6)..(6): Modified Cys
  MOD_RES (8)..(8): Ser or Phospho-Ser
  See specification as filed for detailed description of substitutions and preferred embodiments
TTLHRCVSPGAPQRP

SEQ ID NO: 4971 - protein, 15 aa, Artificial Sequence
  Description of Artificial Sequence: Synthetic peptide
  N-term H or Acetyl
  MOD_RES (8)..(8): Ser or Phospho-Ser
  MOD_RES (10)..(10): Modified Cys
  See specification as filed for detailed description of substitutions and preferred embodiments
TTLHRNVSPCAPQRP

SEQ ID NO: 4972 - protein, 15 aa, Artificial Sequence
  Description of Artificial Sequence: Synthetic peptide
  N-term H or Acetyl
  MOD_RES (8)..(8): Ser or Phospho-Ser
  MOD_RES (11)..(11): Modified Cys
  See specification as filed for detailed description of substitutions and preferred embodiments
TTLHRNVSPGCPQRP

SEQ ID NO: 4973 - protein, 13 aa, Artificial Sequence
  Description of Artificial Sequence: Synthetic peptide
  N-term H or Acetyl
  MOD_RES (8)..(8): Thr or Phospho-Thr
  MOD_RES (10)..(10): Modified Cys
  See specification as filed for detailed description of substitutions and preferred embodiments
TVGNKLDTFCGSP

SEQ ID NO: 4974 - protein, 13 aa, Artificial Sequence
  Description of Artificial Sequence: Synthetic peptide
  N-term H or Acetyl
  MOD_RES (10)..(10): Modified Cys
  MOD_RES (12)..(12): Ser or Phospho-Ser
  See specification as filed for detailed description of substitutions and preferred embodiments
TVGNKLDTFCGSP

SEQ ID NO: 4975 - protein, 14 aa, Artificial Sequence
  Description of Artificial Sequence: Synthetic peptide
  N-term H or Acetyl
  MOD_RES (3)..(3): Modified Cys
  MOD_RES (5)..(5): Thr or Phospho-Thr
  MOD_RES (7)..(7): Thr or Phospho-Thr
  See specification as filed for detailed description of substitutions and preferred embodiments
VACQTPTPTRFLKN

SEQ ID NO: 4976 - protein, 14 aa, Artificial Sequence
  Description of Artificial Sequence: Synthetic peptide
  N-term H or Acetyl
  MOD_RES (7)..(7): Thr or Phospho-Thr
  MOD_RES (9)..(9): Modified Cys
  See specification as filed for detailed description of substitutions and preferred embodiments
VADQTPTPCRFLKN

SEQ ID NO: 4977 - protein, 18 aa, Artificial Sequence
  Description of Artificial Sequence: Synthetic peptide
  N-term H or Acetyl
  MOD_RES (14)..(14): Ser or Phospho-Ser
  MOD_RES (16)..(16): Modified Cys
  See specification as filed for detailed description of substitutions and preferred embodiments
VAKTTKKRPQRATSNCFS

SEQ ID NO: 4978 - protein, 18 aa, Artificial Sequence
  Description of Artificial Sequence: Synthetic peptide
  N-term H or Acetyl
  MOD_RES (16)..(16): Modified Cys
  MOD_RES (18)..(18): Ser or Phospho-Ser
  See specification as filed for detailed description of substitutions and preferred embodiments
VAKTTKKRPQRATSNCFS

SEQ ID NO: 4979 - protein, 20 aa, Artificial Sequence
  Description of Artificial Sequence: Synthetic peptide
  N-term H or Acetyl
  MOD_RES (8)..(8): Modified Cys
  MOD_RES (10)..(10): Thr or Phospho-Thr
  See specification as filed for detailed description of substitutions and preferred embodiments
VANPLMACGTLTRRHQNGRF

SEQ ID NO: 4980 - protein, 10 aa, Artificial Sequence
  Description of Artificial Sequence: Synthetic peptide
  N-term H or Acetyl
  MOD_RES (2)..(2): Modified Cys
  MOD_RES (4)..(4): Ser or Phospho-Ser
  See specification as filed for detailed description of substitutions and preferred embodiments
VCDSLRRKAK

SEQ ID NO: 4981 - protein, 8 aa, Artificial Sequence
  Description of Artificial Sequence: Synthetic peptide
  N-term H or Acetyl
  MOD_RES (2)..(2): Modified Cys
  MOD_RES (4)..(4): Ser or Phospho-Ser
  See specification as filed for detailed description of substitutions and preferred embodiments
VCLSPGPF

SEQ ID NO: 4982 - protein, 15 aa, Artificial Sequence
  Description of Artificial Sequence: Synthetic peptide
  N-term H or Acetyl
  MOD_RES (6)..(6): Modified Cys
  MOD_RES (8)..(8): Ser or Phospho-Ser
  See specification as filed for detailed description of substitutions and preferred embodiments
VDGFTCKSVRKAQRQ

SEQ ID NO: 4983 - protein, 15 aa, Artificial Sequence
  Description of Artificial Sequence: Synthetic peptide
  N-term H or Acetyl
  MOD_RES (8)..(8): Ser or Phospho-Ser
  MOD_RES (10)..(10): Modified Cys
  See specification as filed for detailed description of substitutions and preferred embodiments
VDGFTRKSVCKAQRQ

SEQ ID NO: 4984 - protein, 19 aa, Artificial Sequence
  Description of Artificial Sequence: Synthetic peptide
  N-term H or Acetyl
  MOD_RES (8)..(8): Ser or Phospho-Ser
  MOD_RES (10)..(10): Modified Cys
  See specification as filed for detailed description of substitutions and preferred embodiments
VDLHISNSHCLSLTSDQYK

SEQ ID NO: 4985 - protein, 19 aa, Artificial Sequence
  Description of Artificial Sequence: Synthetic peptide
  N-term H or Acetyl
  MOD_RES (10)..(10): Modified Cys
  MOD_RES (12)..(12): Ser or Phospho-Ser
  See specification as filed for detailed description of substitutions and preferred embodiments
VDLHISNSHCLSLTSDQYK

SEQ ID NO: 4986 - protein, 19 aa, Artificial Sequence
  Description of Artificial Sequence: Synthetic peptide
  N-term H or Acetyl
  MOD_RES (12)..(12): Modified Cys
  MOD_RES (14)..(14): Thr or Phospho-Thr
  See specification as filed for detailed description of substitutions and preferred embodiments
VDLHISNSHPLCLTSDQYK

SEQ ID NO: 4987 - protein, 15 aa, Artificial Sequence
  Description of Artificial Sequence: Synthetic peptide
  N-term H or Acetyl
  MOD_RES (6)..(6): Leu or Nle (i.e. isomer of Leucine)
  MOD_RES (8)..(8): Thr or Phospho-Thr
  MOD_RES (10)..(10): Modified Cys
  See specification as filed for detailed description of substitutions and preferred embodiments
VEVDPLLTPCERHLN

SEQ ID NO: 4988 - protein, 15 aa, Artificial Sequence
  Description of Artificial Sequence: Synthetic peptide
  N-term H or Acetyl
  MOD_RES (6)..(6): Modified Cys
  MOD_RES (8)..(8): Thr or Phospho-Thr
  See specification as filed for detailed description of substitutions and preferred embodiments
VEVDPCLTPEERHLN

SEQ ID NO: 4989 - protein, 15 aa, Artificial Sequence
  Description of Artificial Sequence: Synthetic peptide
  N-term H or Acetyl
  MOD_RES (8)..(8): Thr or Phospho-Thr
  MOD_RES (10)..(10): Modified Cys
  See specification as filed for detailed description of substitutions and preferred embodiments
VKAEPAHTACSVAAK

SEQ ID NO: 4990 - protein, 15 aa, Artificial Sequence
  Description of Artificial Sequence: Synthetic peptide
  N-term H or Acetyl
  MOD_RES (8)..(8): Thr or Phospho-Thr
  MOD_RES (10)..(10): Modified Cys
  See specification as filed for detailed description of substitutions and preferred embodiments
VKRPQRATSCVFAMF

SEQ ID NO: 4991 - protein, 14 aa, Artificial Sequence
  Description of Artificial Sequence: Synthetic peptide
  N-term H or Acetyl
  MOD_RES (3)..(3): Ser or Phospho-Ser
  MOD_RES (5)..(5): Modified Cys
  See specification as filed for detailed description of substitutions and preferred embodiments
VKSPCKEKAKSPEK

SEQ ID NO: 4992 - protein, 14 aa, Artificial Sequence
  Description of Artificial Sequence: Synthetic peptide
  N-term H or Acetyl
  MOD_RES (11)..(11): Ser or Phospho-Ser
  MOD_RES (13)..(13): Modified Cys
  See specification as filed for detailed description of substitutions and preferred embodiments
VKSPAKEKAKSPCK

SEQ ID NO: 4993 - protein, 14 aa, Artificial Sequence
  Description of Artificial Sequence: Synthetic peptide
  N-term H or Acetyl
  MOD_RES (9)..(9): Modified Cys
  MOD_RES (11)..(11): Ser or Phospho-Ser
  See specification as filed for detailed description of substitutions and preferred embodiments
VKSPAKEKCKSPEK

SEQ ID NO: 4994 - protein, 12 aa, Artificial Sequence
  Description of Artificial Sequence: Synthetic peptide
  N-term H or Acetyl
  MOD_RES (5)..(5): Modified Cys
  MOD_RES (7)..(7): Ser or Phospho-Ser
  See specification as filed for detailed description of substitutions and preferred embodiments
VLLRCSSRRIRR

SEQ ID NO: 4995 - protein, 21 aa, Artificial Sequence
  Description of Artificial Sequence: Synthetic peptide
  N-term H or Acetyl
  MOD_RES (7)..(7): Modified Cys
  MOD_RES (9)..(9): Thr or Phospho-Thr
  See specification as filed for detailed description of substitutions and preferred embodiments
VLPWWRCYTWVVERDVNTKQR

SEQ ID NO: 4996 - protein, 15 aa, Artificial Sequence
  Description of Artificial Sequence: Synthetic peptide
  N-term H or Acetyl
  MOD_RES (6)..(6): Modified Cys
  MOD_RES (8)..(8): Ser or Phospho-Ser
  See specification as filed for detailed description of substitutions and preferred embodiments
VLSRQCTSPVSGING

SEQ ID NO: 4997 - protein, 15 aa, Artificial Sequence
  Description of Artificial Sequence: Synthetic peptide
  N-term H or Acetyl
  MOD_RES (8)..(8): Ser or Phospho-Ser
  MOD_RES (10)..(10): Modified Cys
  See specification as filed for detailed description of substitutions and preferred embodiments
VLSRQITSPCSGING

SEQ ID NO: 4998 - protein, 15 aa, Artificial Sequence
  Description of Artificial Sequence: Synthetic peptide
  N-term H or Acetyl
  MOD_RES (6)..(6): Modified Cys
  MOD_RES (8)..(8): Ser or Phospho-Ser
  See specification as filed for detailed description of substitutions and preferred embodiments
VNTRACPSQHSSPAV

SEQ ID NO: 4999 - protein, 10 aa, Artificial Sequence
  Description of Artificial Sequence: Synthetic peptide
  N-term H or Acetyl
  MOD_RES (3)..(3): Modified Cys
  MOD_RES (5)..(5): Thr or Phospho-Thr
  See specification as filed for detailed description of substitutions and preferred embodiments
VPCLTPGGRR

SEQ ID NO: 5000 - protein, 18 aa, Artificial Sequence
  Description of Artificial Sequence: Synthetic peptide
  N-term H or Acetyl
  MOD_RES (5)..(5): Modified Cys
  MOD_RES (7)..(7): Ser or Phospho-Ser
  See specification as filed for detailed description of substitutions and preferred embodiments
VQGICFSQPTSPDHAKKK

SEQ ID NO: 5001 - protein, 15 aa, Artificial Sequence
  Description of Artificial Sequence: Synthetic peptide
  N-term H or Acetyl
  MOD_RES (10)..(10): Ser or Phospho-Ser
  MOD_RES (12)..(12): Modified Cys
  See specification as filed for detailed description of substitutions and preferred embodiments
VQREGFGRQSMCEKR

SEQ ID NO: 5002 - protein, 10 aa, Artificial Sequence
  Description of Artificial Sequence: Synthetic peptide
  N-term H or Acetyl
  MOD_RES (4)..(4): Modified Cys
  MOD_RES (6)..(6): Ser or Phospho-Ser
  See specification as filed for detailed description of substitutions and preferred embodiments
VRRCASFRRR

SEQ ID NO: 5003 - protein, 22 aa, Artificial Sequence
  Description of Artificial Sequence: Synthetic peptide
  N-term H or Acetyl
  MOD_RES (6)..(6): Modified Cys
  MOD_RES (8)..(8): Ser or Phospho-Ser
  See specification as filed for detailed description of substitutions and preferred embodiments
VSGQLCDSMANSFVGTRSYKKK

SEQ ID NO: 5004 - protein, 15 aa, Artificial Sequence
  Description of Artificial Sequence: Synthetic peptide
  N-term H or Acetyl
  MOD_RES (8)..(8): Thr or Phospho-Thr
  MOD_RES (10)..(10): Modified Cys
  See specification as filed for detailed description of substitutions and preferred embodiments
VSYEDPPTACAAVEW

SEQ ID NO: 5005 - protein, 18 aa, Artificial Sequence
  Description of Artificial Sequence: Synthetic peptide
  N-term H or Acetyl
  MOD_RES (14)..(14): Ser or Phospho-Ser
  MOD_RES (16)..(16): Modified Cys
  See specification as filed for detailed description of substitutions and preferred embodiments
WAKTTKKRPQRATSNCFS

SEQ ID NO: 5006 - protein, 18 aa, Artificial Sequence
  Description of Artificial Sequence: Synthetic peptide
  N-term H or Acetyl
  MOD_RES (16)..(16): Modified Cys
  MOD_RES (18)..(18): Ser or Phospho-Ser
  See specification as filed for detailed description of substitutions and preferred embodiments
WAKTTKKRPQRATSNCFS

SEQ ID NO: 5007 - protein, 20 aa, Artificial Sequence
  Description of Artificial Sequence: Synthetic peptide
  N-term H or Acetyl
  MOD_RES (8)..(8): Modified Cys
  MOD_RES (10)..(10): Thr or Phospho-Thr
  See specification as filed for detailed description of substitutions and preferred embodiments
WANPLMACGTLTRRHQNGRF

SEQ ID NO: 5008 - protein, 10 aa, Artificial Sequence
  Description of Artificial Sequence: Synthetic peptide
  N-term H or Acetyl
  MOD_RES (2)..(2): Modified Cys
  MOD_RES (4)..(4): Ser or Phospho-Ser
  See specification as filed for detailed description of substitutions and preferred embodiments
WCDSLRRKAK

SEQ ID NO: 5009 - protein, 8 aa, Artificial Sequence
  Description of Artificial Sequence: Synthetic peptide
  N-term H or Acetyl
  MOD_RES (2)..(2): Modified Cys
  MOD_RES (4)..(4): Ser or Phospho-Ser
  See specification as filed for detailed description of substitutions and preferred embodiments
WCLSPGPF

SEQ ID NO: 5010 - protein, 16 aa, Artificial Sequence
  Description of Artificial Sequence: Synthetic peptide
  N-term H or Acetyl
  MOD_RES (3)..(3): Modified Cys
  MOD_RES (5)..(5): Ser or Phospho-Ser
  See specification as filed for detailed description of substitutions and preferred embodiments
WDCDSDDDDDAAAKKK

SEQ ID NO: 5011 - protein, 13 aa, Artificial Sequence
  Description of Artificial Sequence: Synthetic peptide
  N-term H or Acetyl
  MOD_RES (3)..(3): Modified Cys
  MOD_RES (5)..(5): Ser or Phospho-Ser
  See specification as filed for detailed description of substitutions and preferred embodiments
WDCDSDDDDDAAA

SEQ ID NO: 5012 - protein, 15 aa, Artificial Sequence
  Description of Artificial Sequence: Synthetic peptide
  N-term H or Acetyl
  MOD_RES (8)..(8): Thr or Phospho-Thr
  MOD_RES (10)..(10): Modified Cys
  See specification as filed for detailed description of substitutions and preferred embodiments
WKRPQRATSCVFAMF

SEQ ID NO: 5013 - protein, 12 aa, Artificial Sequence
  Description of Artificial Sequence: Synthetic peptide
  N-term H or Acetyl
  MOD_RES (5)..(5): Modified Cys
  MOD_RES (7)..(7): Ser or Phospho-Ser
  See specification as filed for detailed description of substitutions and preferred embodiments
WLLRCSSRRIRR

SEQ ID NO: 5014 - protein, 21 aa, Artificial Sequence
  Description of Artificial Sequence: Synthetic peptide
  N-term H or Acetyl
  MOD_RES (7)..(7): Modified Cys
  MOD_RES (9)..(9): Thr or Phospho-Thr
  See specification as filed for detailed description of substitutions and preferred embodiments
WLPWWRCYTWVVERDVNTKQR

SEQ ID NO: 5015 - protein, 15 aa, Artificial Sequence
  Description of Artificial Sequence: Synthetic peptide
  N-term H or Acetyl
  MOD_RES (10)..(10): Ser or Phospho-Ser
  MOD_RES (12)..(12): Modified Cys
  See specification as filed for detailed description of substitutions and preferred embodiments
WQREGFGRQSMCEKR

SEQ ID NO: 5016 - protein, 17 aa, Artificial Sequence
  Description of Artificial Sequence: Synthetic peptide
  N-term H or Acetyl
  MOD_RES (3)..(3): Modified Cys
  MOD_RES (5)..(5): Thr or Phospho-Thr
  See specification as filed for detailed description of substitutions and preferred embodiments
WRCYTLRRARQGNTKQR

SEQ ID NO: 5017 - protein, 10 aa, Artificial Sequence
  Description of Artificial Sequence: Synthetic peptide
  N-term H or Acetyl
  MOD_RES (4)..(4): Modified Cys
  MOD_RES (6)..(6): Ser or Phospho-Ser
  See specification as filed for detailed description of substitutions and preferred embodiments
WRRCASFRRR

SEQ ID NO: 5018 - protein, 15 aa, Artificial Sequence
  Description of Artificial Sequence: Synthetic peptide
  N-term H or Acetyl
  MOD_RES (2)..(2): Leu or Nle (i.e. isomer of Leucine)
  MOD_RES (4)..(4): Leu or Nle (i.e. isomer of Leucine)
  MOD_RES (8)..(8): Ser or Phospho-Ser
  MOD_RES (10)..(10): Modified Cys
  See specification as filed for detailed description of substitutions and preferred embodiments
YLPLSPKSVCAPQQI

SEQ ID NO: 5019 - protein, 16 aa, Artificial Sequence
  Description of Artificial Sequence: Synthetic peptide
  N-term H or Acetyl
  MOD_RES (8)..(8): Ser or Phospho-Ser
  MOD_RES (10)..(10): Modified Cys
  See specification as filed for detailed description of substitutions and preferred embodiments
YANWMAASICLDGKKK

SEQ ID NO: 5020 - protein, 16 aa, Artificial Sequence
  Description of Artificial Sequence: Synthetic peptide
  N-term H or Acetyl
  MOD_RES (6)..(6): Modified Cys
  MOD_RES (8)..(8): Ser or Phospho-Ser
  See specification as filed for detailed description of substitutions and preferred embodiments
YANWMCASIYLDGKKK

SEQ ID NO: 5021 - protein, 15 aa, Artificial Sequence
  Description of Artificial Sequence: Synthetic peptide
  N-term H or Acetyl
  MOD_RES (8)..(8): Thr or Phospho-Thr
  MOD_RES (10)..(10): Modified Cys
  See specification as filed for detailed description of substitutions and preferred embodiments
YKRRYVETPCVHISS

SEQ ID NO: 5022 - protein, 26 aa, Artificial Sequence
  Description of Artificial Sequence: Synthetic peptide
  N-term H or Acetyl
  MOD_RES (13)..(13): Ser or Phospho-Ser
  MOD_RES (15)..(15): Modified Cys
  MOD_RES (21)..(21): Ser or Phospho-Ser
  See specification as filed for detailed description of substitutions and preferred embodiments
YRRAAVPPSPSLSRCSSPHQSEDEEE

SEQ ID NO: 5023 - protein, 26 aa, Artificial Sequence
  Description of Artificial Sequence: Synthetic peptide
  N-term H or Acetyl
  MOD_RES (15)..(15): Modified Cys
  MOD_RES (17)..(17): Ser or Phospho-Ser
  MOD_RES (21)..(21): Ser or Phospho-Ser
  See specification as filed for detailed description of substitutions and preferred embodiments
YRRAAVPPSPSLSRCSSPHQSEDEEE

SEQ ID NO: 5024 - protein, 15 aa, Artificial Sequence
  Description of Artificial Sequence: Synthetic peptide
  N-term H or Acetyl
  MOD_RES (8)..(8): Ser or Phospho-Ser
  MOD_RES (10)..(10): Modified Cys
  See specification as filed for detailed description of substitutions and preferred embodiments
YSHKGHLSECLVTKW

SEQ ID NO: 5025 - protein, 8 aa, Artificial Sequence
  Description of Artificial Sequence: Synthetic peptide
  N-term H or Acetyl
  MOD_RES (1)..(1): Leu or Nle (i.e. isomer of Leucine)
  MOD_RES (6)..(6): Tyr or Phospho-Tyr
  MOD_RES (8)..(8): Modified Cys
  See specification as filed for detailed description of substitutions and preferred embodiments
LEEEEYIC

SEQ ID NO: 5026 - protein, 9 aa, Artificial Sequence
  Description of Artificial Sequence: Synthetic peptide
  N-term H or Acetyl
  MOD_RES (1)..(1): Leu or Nle (i.e. isomer of Leucine)
  MOD_RES (5)..(5): Tyr or Phospho-Tyr
  MOD_RES (7)..(7): Modified Cys
  See specification as filed for detailed description of substitutions and preferred embodiments
LEEEYICIV

SEQ ID NO: 5027 - protein, 9 aa, Artificial Sequence
  Description of Artificial Sequence: Synthetic peptide
  N-term H or Acetyl
  MOD_RES (1)..(1): Leu or Nle (i.e. isomer of Leucine)
  MOD_RES (5)..(5): Tyr or Phospho-Tyr
  MOD_RES (7)..(7): Modified Cys
  See specification as filed for detailed description of substitutions and preferred embodiments
LEPIYICVP

SEQ ID NO: 5028 - protein, 15 aa, Artificial Sequence
  Description of Artificial Sequence: Synthetic peptide
  N-term H or Acetyl
  MOD_RES (1)..(1): Leu or Nle (i.e. isomer of Leucine)
  MOD_RES (8)..(8): Tyr or Phospho-Tyr
  MOD_RES (10)..(10): Modified Cys
  See specification as filed for detailed description of substitutions and preferred embodiments
LVSETDDYACIIDEE

SEQ ID NO: 5029 - protein, 9 aa, Artificial Sequence
  Description of Artificial Sequence: Synthetic peptide
  N-term H or Acetyl
  MOD_RES (4)..(4): Tyr or Phospho-Tyr
  MOD_RES (6)..(6): Modified Cys
  See specification as filed for detailed description of substitutions and preferred embodiments
ADEYLCPQQ

SEQ ID NO: 5030 - protein, 21 aa, Artificial Sequence
  Description of Artificial Sequence: Synthetic peptide
  N-term H or Acetyl
  MOD_RES (14)..(14): Tyr or Phospho-Tyr
  MOD_RES (16)..(16): Modified Cys
  See specification as filed for detailed description of substitutions and preferred embodiments
ADPDHDHTGFLTEYVCTRWRR

SEQ ID NO: 5031 - protein, 15 aa, Artificial Sequence
  Description of Artificial Sequence: Synthetic peptide
  N-term H or Acetyl
  MOD_RES (4)..(4): Modified Cys
  MOD_RES (6)..(6): Tyr or Phospho-Tyr
  See specification as filed for detailed description of substitutions and preferred embodiments
AEECIYGEFEAKKKK

SEQ ID NO: 5032 - protein, 8 aa, Artificial Sequence
  Description of Artificial Sequence: Synthetic peptide
  N-term H or Acetyl
  MOD_RES (6)..(6): Tyr or Phospho-Tyr
  MOD_RES (8)..(8): Modified Cys
  See specification as filed for detailed description of substitutions and preferred embodiments
AEEEEYIC

SEQ ID NO: 5033 - protein, 9 aa, Artificial Sequence
  Description of Artificial Sequence: Synthetic peptide
  N-term H or Acetyl
  MOD_RES (5)..(5): Tyr or Phospho-Tyr
  MOD_RES (7)..(7): Modified Cys
  See specification as filed for detailed description of substitutions and preferred embodiments
AEEEYICIV

SEQ ID NO: 5034 - protein, 10 aa, Artificial Sequence
  Description of Artificial Sequence: Synthetic peptide
  N-term H or Acetyl
  MOD_RES (6)..(6): Tyr or Phospho-Tyr
  MOD_RES (8)..(8): Modified Cys
  See specification as filed for detailed description of substitutions and preferred embodiments
AENAEYLCVA

SEQ ID NO: 5035 - protein, 15 aa, Artificial Sequence
  Description of Artificial Sequence: Synthetic peptide
  N-term H or Acetyl
  MOD_RES (8)..(8): Tyr or Phospho-Tyr
  MOD_RES (10)..(10): Modified Cys
  See specification as filed for detailed description of substitutions and preferred embodiments
AGKEQTYYQCRHLGD

SEQ ID NO: 5036 - protein, 16 aa, Artificial Sequence
  Description of Artificial Sequence: Synthetic peptide
  N-term H or Acetyl
  MOD_RES (5)..(5): Modified Cys
  MOD_RES (7)..(7): Tyr or Phospho-Tyr
  See specification as filed for detailed description of substitutions and preferred embodiments
AKAACGYVKPQIKQVV

SEQ ID NO: 5037 - protein, 16 aa, Artificial Sequence
  Description of Artificial Sequence: Synthetic peptide
  N-term H or Acetyl
  MOD_RES (7)..(7): Tyr or Phospho-Tyr
  MOD_RES (9)..(9): Modified Cys
  See specification as filed for detailed description of substitutions and preferred embodiments
AKAADGYVCPQIKQVV

SEQ ID NO: 5038 - protein, 16 aa, Artificial Sequence
  Description of Artificial Sequence: Synthetic peptide
  N-term H or Acetyl
  MOD_RES (4)..(4): Modified Cys
  MOD_RES (7)..(7): Tyr or Phospho-Tyr
  See specification as filed for detailed description of substitutions and preferred embodiments
AKACDGYVKPQIKQVV

SEQ ID NO: 5039 - protein, 13 aa, Artificial Sequence
  Description of Artificial Sequence: Synthetic peptide
  N-term H or Acetyl
  MOD_RES (8)..(8): Tyr or Phospho-Tyr
  MOD_RES (11)..(11): Pro or d-isoform of Pro
  MOD_RES (12)..(12): Modified Cys
  See specification as filed for detailed description of substitutions and preferred embodiments
ARKRERAYSAPCG

SEQ ID NO: 5040 - protein, 13 aa, Artificial Sequence
  Description of Artificial Sequence: Synthetic peptide
  N-term H or Acetyl
  MOD_RES (8)..(8): Tyr or Phospho-Tyr
  MOD_RES (11)..(11): Pro or d-isoform of Pro
  MOD_RES (12)..(12): Modified Cys
  See specification as filed for detailed description of substitutions and preferred embodiments
ARKRERAYSDPCG

SEQ ID NO: 5041 - protein, 12 aa, Artificial Sequence
  Description of Artificial Sequence: Synthetic peptide
  N-term H or Acetyl
  MOD_RES (8)..(8): Tyr or Phospho-Tyr
  MOD_RES (11)..(11): Modified Cys
  See specification as filed for detailed description of substitutions and preferred embodiments
ARKRERAYSECG

SEQ ID NO: 5042 - protein, 13 aa, Artificial Sequence
  Description of Artificial Sequence: Synthetic peptide
  N-term H or Acetyl
  MOD_RES (8)..(8): Tyr or Phospho-Tyr
  MOD_RES (11)..(11): Leu or Nle (i.e. isomer of Leucine)
  MOD_RES (12)..(12): Modified Cys
  See specification as filed for detailed description of substitutions and preferred embodiments
ARKRERAYSFLCG

SEQ ID NO: 5043 - protein, 15 aa, Artificial Sequence
  Description of Artificial Sequence: Synthetic peptide
  N-term H or Acetyl
  MOD_RES (8)..(8): Tyr or Phospho-Tyr
  MOD_RES (10)..(10): Modified Cys
  See specification as filed for detailed description of substitutions and preferred embodiments
ARPLVEFYECIKKYE

SEQ ID NO: 5044 - protein, 15 aa, Artificial Sequence
  Description of Artificial Sequence: Synthetic peptide
  N-term H or Acetyl
  MOD_RES (8)..(8): Tyr or Phospho-Tyr
  MOD_RES (10)..(10): Modified Cys
  See specification as filed for detailed description of substitutions and preferred embodiments
AVLADVSYLCAMEKS

SEQ ID NO: 5045 - protein, 15 aa, Artificial Sequence
  Description of Artificial Sequence: Synthetic peptide
  N-term H or Acetyl
  MOD_RES (8)..(8): Tyr or Phospho-Tyr
  MOD_RES (10)..(10): Modified Cys
  See specification as filed for detailed description of substitutions and preferred embodiments
AVSETDDYACIIDEE

SEQ ID NO: 5046 - protein, 16 aa, Artificial Sequence
  Description of Artificial Sequence: Synthetic peptide
  N-term H or Acetyl
  MOD_RES (1)..(1): Modified Cys
  MOD_RES (3)..(3): Tyr or Phospho-Tyr
  See specification as filed for detailed description of substitutions and preferred embodiments
CFYTLRRARQGNTKQR

SEQ ID NO: 5047 - protein, 11 aa, Artificial Sequence
  Description of Artificial Sequence: Synthetic peptide
  N-term H or Acetyl
  MOD_RES (5)..(5): Tyr or Phospho-Tyr
  MOD_RES (7)..(7): Modified Cys
  See specification as filed for detailed description of substitutions and preferred embodiments
DADEYLCPQQG

SEQ ID NO: 5048 - protein, 11 aa, Artificial Sequence
  Description of Artificial Sequence: Synthetic peptide
  N-term H or Acetyl
  MOD_RES (3)..(3): Modified Cys
  MOD_RES (5)..(5): Tyr or Phospho-Tyr
  See specification as filed for detailed description of substitutions and preferred embodiments
DECDYEEPDEP

SEQ ID NO: 5049 - protein, 11 aa, Artificial Sequence
  Description of Artificial Sequence: Synthetic peptide
  N-term H or Acetyl
  MOD_RES (5)..(5): Tyr or Phospho-Tyr
  MOD_RES (7)..(7): Modified Cys
  See specification as filed for detailed description of substitutions and preferred embodiments
DEEDYECPDEP

SEQ ID NO: 5050 - protein, 8 aa, Artificial Sequence
  Description of Artificial Sequence: Synthetic peptide
  N-term H or Acetyl
  MOD_RES (6)..(6): Tyr or Phospho-Tyr
  MOD_RES (8)..(8): Modified Cys
  See specification as filed for detailed description of substitutions and preferred embodiments
DEEEEYIC

SEQ ID NO: 5051 - protein, 9 aa, Artificial Sequence
  Description of Artificial Sequence: Synthetic peptide
  N-term H or Acetyl
  MOD_RES (5)..(5): Tyr or Phospho-Tyr
  MOD_RES (7)..(7): Modified Cys
  See specification as filed for detailed description of substitutions and preferred embodiments
DEEEYICIV

SEQ ID NO: 5052 - protein, 15 aa, Artificial Sequence
  Description of Artificial Sequence: Synthetic peptide
  N-term H or Acetyl
  MOD_RES (5)..(5): Modified Cys
  MOD_RES (7)..(7): Tyr or Phospho-Tyr
  See specification as filed for detailed description of substitutions and preferred embodiments
DEPECDYEEVLEPED

SEQ ID NO: 5053 - protein, 15 aa, Artificial Sequence
  Description of Artificial Sequence: Synthetic peptide
  N-term H or Acetyl
  MOD_RES (5)..(5): Modified Cys
  MOD_RES (7)..(7): Tyr or Phospho-Tyr
  See specification as filed for detailed description of substitutions and preferred embodiments
DEPECDYFEWLEPED

SEQ ID NO: 5054 - protein, 15 aa, Artificial Sequence
  Description of Artificial Sequence: Synthetic peptide
  N-term H or Acetyl
  MOD_RES (7)..(7): Tyr or Phospho-Tyr
  MOD_RES (9)..(9): Modified Cys
  See specification as filed for detailed description of substitutions and preferred embodiments
DEPEGDYECVLEPED

SEQ ID NO: 5055 - protein, 15 aa, Artificial Sequence
  Description of Artificial Sequence: Synthetic peptide
  N-term H or Acetyl
  MOD_RES (7)..(7): Tyr or Phospho-Tyr
  MOD_RES (9)..(9): Modified Cys
  See specification as filed for detailed description of substitutions and preferred embodiments
DEPEGDYFCWLEPED

SEQ ID NO: 5056 - protein, 15 aa, Artificial Sequence
  Description of Artificial Sequence: Synthetic peptide
  N-term H or Acetyl
  MOD_RES (8)..(8): Tyr or Phospho-Tyr
  MOD_RES (10)..(10): Modified Cys
  See specification as filed for detailed description of substitutions and preferred embodiments
DGDGQVNYECFVQMM

SEQ ID NO: 5057 - protein, 15 aa, Artificial Sequence
  Description of Artificial Sequence: Synthetic peptide
  N-term H or Acetyl
  MOD_RES (8)..(8): Tyr or Phospho-Tyr
  MOD_RES (10)..(10): Modified Cys
  See specification as filed for detailed description of substitutions and preferred embodiments
DGSDHPYYNCIPSKM

SEQ ID NO: 5058 - protein, 17 aa, Artificial Sequence
  Description of Artificial Sequence: Synthetic peptide
  N-term H or Acetyl
  MOD_RES (4)..(4): Leu or Nle (i.e. isomer of Leucine)
  MOD_RES (6)..(6): Modified Cys
  MOD_RES (8)..(8): Tyr or Phospho-Tyr
  See specification as filed for detailed description of substitutions and preferred embodiments
DLILKCDYELVSTKPTR

SEQ ID NO: 5059 - protein, 17 aa, Artificial Sequence
  Description of Artificial Sequence: Synthetic peptide
  N-term H or Acetyl
  MOD_RES (4)..(4): Leu or Nle (i.e. isomer of Leucine)
  MOD_RES (8)..(8): Tyr or Phospho-Tyr
  MOD_RES (10)..(10): Modified Cys
  See specification as filed for detailed description of substitutions and preferred embodiments
DLILKEDYECVSTKPTR

SEQ ID NO: 5060 - protein, 17 aa, Artificial Sequence
  Description of Artificial Sequence: Synthetic peptide
  N-term H or Acetyl
  MOD_RES (6)..(6): Modified Cys
  MOD_RES (8)..(8): Tyr or Phospho-Tyr
  See specification as filed for detailed description of substitutions and preferred embodiments
DLIMKCDYELVSTKPTR

SEQ ID NO: 5061 - protein, 17 aa, Artificial Sequence
  Description of Artificial Sequence: Synthetic peptide
  N-term H or Acetyl
  MOD_RES (8)..(8): Tyr or Phospho-Tyr
  MOD_RES (10)..(10): Modified Cys
  See specification as filed for detailed description of substitutions and preferred embodiments
DLIMKEDYECVSTKPTR

SEQ ID NO: 5062 - protein, 13 aa, Artificial Sequence
  Description of Artificial Sequence: Synthetic peptide
  N-term H or Acetyl
  MOD_RES (5)..(5): Modified Cys
  MOD_RES (7)..(7): Tyr or Phospho-Tyr
  See specification as filed for detailed description of substitutions and preferred embodiments
DNDPCEYITLDED

SEQ ID NO: 5063 - protein, 13 aa, Artificial Sequence
  Description of Artificial Sequence: Synthetic peptide
  N-term H or Acetyl
  MOD_RES (5)..(5): Modified Cys
  MOD_RES (7)..(7): Tyr or Phospho-Tyr
  See specification as filed for detailed description of substitutions and preferred embodiments
DNDPCRYIRTEDE

SEQ ID NO: 5064 - protein, 13 aa, Artificial Sequence
  Description of Artificial Sequence: Synthetic peptide
  N-term H or Acetyl
  MOD_RES (7)..(7): Tyr or Phospho-Tyr
  MOD_RES (9)..(9): Modified Cys
  See specification as filed for detailed description of substitutions and preferred embodiments
DNDPDEYICLDED

SEQ ID NO: 5065 - protein, 13 aa, Artificial Sequence
  Description of Artificial Sequence: Synthetic peptide
  N-term H or Acetyl
  MOD_RES (7)..(7): Tyr or Phospho-Tyr
  MOD_RES (9)..(9): Modified Cys
  See specification as filed for detailed description of substitutions and preferred embodiments
DNDPDRYICTEDE

SEQ ID NO: 5066 - protein, 20 aa, Artificial Sequence
  Description of Artificial Sequence: Synthetic peptide
  N-term H or Acetyl
  MOD_RES (11)..(11): Modified Cys
  MOD_RES (13)..(13): Tyr or Phospho-Tyr
  See specification as filed for detailed description of substitutions and preferred embodiments
DRHEQEDEPECDYEEVLEPE

SEQ ID NO: 5067 - protein, 20 aa, Artificial Sequence
  Description of Artificial Sequence: Synthetic peptide
  N-term H or Acetyl
  MOD_RES (11)..(11): Modified Cys
  MOD_RES (13)..(13): Tyr or Phospho-Tyr
  See specification as filed for detailed description of substitutions and preferred embodiments
DRHEQEDEPECDYFEWLEPE

SEQ ID NO: 5068 - protein, 20 aa, Artificial Sequence
  Description of Artificial Sequence: Synthetic peptide
  N-term H or Acetyl
  MOD_RES (13)..(13): Tyr or Phospho-Tyr
  MOD_RES (15)..(15): Modified Cys
  See specification as filed for detailed description of substitutions and preferred embodiments
DRHEQEDEPEGDYECVLEPE

SEQ ID NO: 5069 - protein, 20 aa, Artificial Sequence
  Description of Artificial Sequence: Synthetic peptide
  N-term H or Acetyl
  MOD_RES (13)..(13): Tyr or Phospho-Tyr
  MOD_RES (15)..(15): Modified Cys
  See specification as filed for detailed description of substitutions and preferred embodiments
DRHEQEDEPEGDYFCWLEPE

SEQ ID NO: 5070 - protein, 15 aa, Artificial Sequence
  Description of Artificial Sequence: Synthetic peptide
  N-term H or Acetyl
  MOD_RES (8)..(8): Tyr or Phospho-Tyr
  MOD_RES (10)..(10): Modified Cys
  See specification as filed for detailed description of substitutions and preferred embodiments
DVSETDDYACIIDEE

SEQ ID NO: 5071 - protein, 15 aa, Artificial Sequence
  Description of Artificial Sequence: Synthetic peptide
  N-term H or Acetyl
  MOD_RES (8)..(8): Tyr or Phospho-Tyr
  MOD_RES (10)..(10): Modified Cys
  See specification as filed for detailed description of substitutions and preferred embodiments
DVVDADEYLCPQQGF

SEQ ID NO: 5072 - protein, 10 aa, Artificial Sequence
  Description of Artificial Sequence: Synthetic peptide
  N-term H or Acetyl
  MOD_RES (3)..(3): Modified Cys
  MOD_RES (5)..(5): Tyr or Phospho-Tyr
  See specification as filed for detailed description of substitutions and preferred embodiments
EDCDYEWPSA

SEQ ID NO: 5073 - protein, 12 aa, Artificial Sequence
  Description of Artificial Sequence: Synthetic peptide
  N-term H or Acetyl
  MOD_RES (4)..(4): Modified Cys
  MOD_RES (6)..(6): Tyr or Phospho-Tyr
  See specification as filed for detailed description of substitutions and preferred embodiments
EDECIYEELDEP

SEQ ID NO: 5074 - protein, 12 aa, Artificial Sequence
  Description of Artificial Sequence: Synthetic peptide
  N-term H or Acetyl
  MOD_RES (6)..(6): Tyr or Phospho-Tyr
  MOD_RES (8)..(8): Modified Cys
  See specification as filed for detailed description of substitutions and preferred embodiments
EDEDIYECLDEP

SEQ ID NO: 5075 - protein, 13 aa, Artificial Sequence
  Description of Artificial Sequence: Synthetic peptide
  N-term H or Acetyl
  MOD_RES (5)..(5): Modified Cys
  MOD_RES (7)..(7): Tyr or Phospho-Tyr
  See specification as filed for detailed description of substitutions and preferred embodiments
EDEGCRYLKLEED

SEQ ID NO: 5076 - protein, 13 aa, Artificial Sequence
  Description of Artificial Sequence: Synthetic peptide
  N-term H or Acetyl
  MOD_RES (7)..(7): Tyr or Phospho-Tyr
  MOD_RES (9)..(9): Modified Cys
  See specification as filed for detailed description of substitutions and preferred embodiments
EDEGDRYLCLEED

SEQ ID NO: 5077 - protein, 15 aa, Artificial Sequence
  Description of Artificial Sequence: Synthetic peptide
  N-term H or Acetyl
  MOD_RES (8)..(8): Tyr or Phospho-Tyr
  MOD_RES (10)..(10): Modified Cys
  See specification as filed for detailed description of substitutions and preferred embodiments
EDGGDDIYECIIKVE

SEQ ID NO: 5078 - protein, 10 aa, Artificial Sequence
  Description of Artificial Sequence: Synthetic peptide
  N-term H or Acetyl
  MOD_RES (5)..(5): Tyr or Phospho-Tyr
  MOD_RES (7)..(7): Modified Cys
  See specification as filed for detailed description of substitutions and preferred embodiments
EDPDYECPSA

SEQ ID NO: 5079 - protein, 9 aa, Artificial Sequence
  Description of Artificial Sequence: Synthetic peptide
  N-term H or Acetyl
  MOD_RES (5)..(5): Tyr or Phospho-Tyr
  MOD_RES (7)..(7): Modified Cys
  See specification as filed for detailed description of substitutions and preferred embodiments
EDPDYFCFG

SEQ ID NO: 5080 - protein, 9 aa, Artificial Sequence
  Description of Artificial Sequence: Synthetic peptide
  N-term H or Acetyl
  MOD_RES (5)..(5): Tyr or Phospho-Tyr
  MOD_RES (7)..(7): Modified Cys
  See specification as filed for detailed description of substitutions and preferred embodiments
EDPDYFCFK

SEQ ID NO: 5081 - protein, 9 aa, Artificial Sequence
  Description of Artificial Sequence: Synthetic peptide
  N-term H or Acetyl
  MOD_RES (5)..(5): Tyr or Phospho-Tyr
  MOD_RES (7)..(7): Modified Cys
  See specification as filed for detailed description of substitutions and preferred embodiments
EDPDYFCFP

SEQ ID NO: 5082 - protein, 9 aa, Artificial Sequence
  Description of Artificial Sequence: Synthetic peptide
  N-term H or Acetyl
  MOD_RES (5)..(5): Tyr or Phospho-Tyr
  MOD_RES (7)..(7): Modified Cys
  See specification as filed for detailed description of substitutions and preferred embodiments
EDPDYFCIG

SEQ ID NO: 5083 - protein, 9 aa, Artificial Sequence
  Description of Artificial Sequence: Synthetic peptide
  N-term H or Acetyl
  MOD_RES (5)..(5): Tyr or Phospho-Tyr
  MOD_RES (7)..(7): Modified Cys
  See specification as filed for detailed description of substitutions and preferred embodiments
EDPDYFCIK

SEQ ID NO: 5084 - protein, 9 aa, Artificial Sequence
  Description of Artificial Sequence: Synthetic peptide
  N-term H or Acetyl
  MOD_RES (5)..(5): Tyr or Phospho-Tyr
  MOD_RES (7)..(7): Modified Cys
  See specification as filed for detailed description of substitutions and preferred embodiments
EDPDYFCIP

SEQ ID NO: 5085 - protein, 9 aa, Artificial Sequence
  Description of Artificial Sequence: Synthetic peptide
  N-term H or Acetyl
  MOD_RES (5)..(5): Tyr or Phospho-Tyr
  MOD_RES (7)..(7): Modified Cys
  See specification as filed for detailed description of substitutions and preferred embodiments
EDPDYFCMG

SEQ ID NO: 5086 - protein, 9 aa, Artificial Sequence
  Description of Artificial Sequence: Synthetic peptide
  N-term H or Acetyl
  MOD_RES (5)..(5): Tyr or Phospho-Tyr
  MOD_RES (7)..(7): Modified Cys
  See specification as filed for detailed description of substitutions and preferred embodiments
EDPDYFCMK

SEQ ID NO: 5087 - protein, 9 aa, Artificial Sequence
  Description of Artificial Sequence: Synthetic peptide
  N-term H or Acetyl
  MOD_RES (5)..(5): Tyr or Phospho-Tyr
  MOD_RES (7)..(7): Modified Cys
  See specification as filed for detailed description of substitutions and preferred embodiments
EDPDYFCMP

SEQ ID NO: 5088 - protein, 9 aa, Artificial Sequence
  Description of Artificial Sequence: Synthetic peptide
  N-term H or Acetyl
  MOD_RES (5)..(5): Tyr or Phospho-Tyr
  MOD_RES (7)..(7): Modified Cys
  See specification as filed for detailed description of substitutions and preferred embodiments
EDPDYFCVG

SEQ ID NO: 5089 - protein, 9 aa, Artificial Sequence
  Description of Artificial Sequence: Synthetic peptide
  N-term H or Acetyl
  MOD_RES (5)..(5): Tyr or Phospho-Tyr
  MOD_RES (7)..(7): Modified Cys
  See specification as filed for detailed description of substitutions and preferred embodiments
EDPDYFCVK

SEQ ID NO: 5090 - protein, 9 aa, Artificial Sequence
  Description of Artificial Sequence: Synthetic peptide
  N-term H or Acetyl
  MOD_RES (5)..(5): Tyr or Phospho-Tyr
  MOD_RES (7)..(7): Modified Cys
  See specification as filed for detailed description of substitutions and preferred embodiments
EDPDYFCVP

SEQ ID NO: 5091 - protein, 9 aa, Artificial Sequence
  Description of Artificial Sequence: Synthetic peptide
  N-term H or Acetyl
  MOD_RES (5)..(5): Tyr or Phospho-Tyr
  MOD_RES (7)..(7): Modified Cys
  See specification as filed for detailed description of substitutions and preferred embodiments
EDPDYICFG

SEQ ID NO: 5092 - protein, 9 aa, Artificial Sequence
  Description of Artificial Sequence: Synthetic peptide
  N-term H or Acetyl
  MOD_RES (5)..(5): Tyr or Phospho-Tyr
  MOD_RES (7)..(7): Modified Cys
  See specification as filed for detailed description of substitutions and preferred embodiments
EDPDYICFK

SEQ ID NO: 5093 - protein, 9 aa, Artificial Sequence
  Description of Artificial Sequence: Synthetic peptide
  N-term H or Acetyl
  MOD_RES (5)..(5): Tyr or Phospho-Tyr
  MOD_RES (7)..(7): Modified Cys
  See specification as filed for detailed description of substitutions and preferred embodiments
EDPDYICFP

SEQ ID NO: 5094 - protein, 9 aa, Artificial Sequence
  Description of Artificial Sequence: Synthetic peptide
  N-term H or Acetyl
  MOD_RES (5)..(5): Tyr or Phospho-Tyr
  MOD_RES (7)..(7): Modified Cys
  See specification as filed for detailed description of substitutions and preferred embodiments
EDPDYICIG

SEQ ID NO: 5095 - protein, 9 aa, Artificial Sequence
  Description of Artificial Sequence: Synthetic peptide
  N-term H or Acetyl
  MOD_RES (5)..(5): Tyr or Phospho-Tyr
  MOD_RES (7)..(7): Modified Cys
  See specification as filed for detailed description of substitutions and preferred embodiments
EDPDYICIK

SEQ ID NO: 5096 - protein, 9 aa, Artificial Sequence
  Description of Artificial Sequence: Synthetic peptide
  N-term H or Acetyl
  MOD_RES (5)..(5): Tyr or Phospho-Tyr
  MOD_RES (7)..(7): Modified Cys
  See specification as filed for detailed description of substitutions and preferred embodiments
EDPDYICIP

SEQ ID NO: 5097 - protein, 9 aa, Artificial Sequence
  Description of Artificial Sequence: Synthetic peptide
  N-term H or Acetyl
  MOD_RES (5)..(5): Tyr or Phospho-Tyr
  MOD_RES (7)..(7): Modified Cys
  See specification as filed for detailed description of substitutions and preferred embodiments
EDPDYICMG

SEQ ID NO: 5098 - protein, 9 aa, Artificial Sequence
  Description of Artificial Sequence: Synthetic peptide
  N-term H or Acetyl
  MOD_RES (5)..(5): Tyr or Phospho-Tyr
  MOD_RES (7)..(7): Modified Cys
  See specification as filed for detailed description of substitutions and preferred embodiments
EDPDYICMK

SEQ ID NO: 5099 - protein, 9 aa, Artificial Sequence
  Description of Artificial Sequence: Synthetic peptide
  N-term H or Acetyl
  MOD_RES (5)..(5): Tyr or Phospho-Tyr
  MOD_RES (7)..(7): Modified Cys
  See specification as filed for detailed description of substitutions and preferred embodiments
EDPDYICMP

SEQ ID NO: 5100 - protein, 9 aa, Artificial Sequence
  Description of Artificial Sequence: Synthetic peptide
  N-term H or Acetyl
  MOD_RES (5)..(5): Tyr or Phospho-Tyr
  MOD_RES (7)..(7): Modified Cys
  See specification as filed for detailed description of substitutions and preferred embodiments
EDPDYICVG

SEQ ID NO: 5101 - protein, 9 aa, Artificial Sequence
  Description of Artificial Sequence: Synthetic peptide
  N-term H or Acetyl
  MOD_RES (5)..(5): Tyr or Phospho-Tyr
  MOD_RES (7)..(7): Modified Cys
  See specification as filed for detailed description of substitutions and preferred embodiments
EDPDYICVK

SEQ ID NO: 5102 - protein, 9 aa, Artificial Sequence
  Description of Artificial Sequence: Synthetic peptide
  N-term H or Acetyl
  MOD_RES (5)..(5): Tyr or Phospho-Tyr
  MOD_RES (7)..(7): Modified Cys
  See specification as filed for detailed description of substitutions and preferred embodiments
EDPDYICVP

SEQ ID NO: 5103 - protein, 9 aa, Artificial Sequence
  Description of Artificial Sequence: Synthetic peptide
  N-term H or Acetyl
  MOD_RES (5)..(5): Tyr or Phospho-Tyr
  MOD_RES (7)..(7): Modified Cys
  See specification as filed for detailed description of substitutions and preferred embodiments
EDPDYVCFG

SEQ ID NO: 5104 - protein, 9 aa, Artificial Sequence
  Description of Artificial Sequence: Synthetic peptide
  N-term H or Acetyl
  MOD_RES (5)..(5): Tyr or Phospho-Tyr
  MOD_RES (7)..(7): Modified Cys
  See specification as filed for detailed description of substitutions and preferred embodiments
EDPDYVCFK

SEQ ID NO: 5105 - protein, 9 aa, Artificial Sequence
  Description of Artificial Sequence: Synthetic peptide
  N-term H or Acetyl
  MOD_RES (5)..(5): Tyr or Phospho-Tyr
  MOD_RES (7)..(7): Modified Cys
  See specification as filed for detailed description of substitutions and preferred embodiments
EDPDYVCFP

SEQ ID NO: 5106 - protein, 9 aa, Artificial Sequence
  Description of Artificial Sequence: Synthetic peptide
  N-term H or Acetyl
  MOD_RES (5)..(5): Tyr or Phospho-Tyr
  MOD_RES (7)..(7): Modified Cys
  See specification as filed for detailed description of substitutions and preferred embodiments
EDPDYVCIG

SEQ ID NO: 5107 - protein, 9 aa, Artificial Sequence
  Description of Artificial Sequence: Synthetic peptide
  N-term H or Acetyl
  MOD_RES (5)..(5): Tyr or Phospho-Tyr
  MOD_RES (7)..(7): Modified Cys
  See specification as filed for detailed description of substitutions and preferred embodiments
EDPDYVCIK

SEQ ID NO: 5108 - protein, 9 aa, Artificial Sequence
  Description of Artificial Sequence: Synthetic peptide
  N-term H or Acetyl
  MOD_RES (5)..(5): Tyr or Phospho-Tyr
  MOD_RES (7)..(7): Modified Cys
  See specification as filed for detailed description of substitutions and preferred embodiments
EDPDYVCIP

SEQ ID NO: 5109 - protein, 9 aa, Artificial Sequence
  Description of Artificial Sequence: Synthetic peptide
  N-term H or Acetyl
  MOD_RES (5)..(5): Tyr or Phospho-Tyr
  MOD_RES (7)..(7): Modified Cys
  See specification as filed for detailed description of substitutions and preferred embodiments
EDPDYVCMG

SEQ ID NO: 5110 - protein, 9 aa, Artificial Sequence
  Description of Artificial Sequence: Synthetic peptide
  N-term H or Acetyl
  MOD_RES (5)..(5): Tyr or Phospho-Tyr
  MOD_RES (7)..(7): Modified Cys
  See specification as filed for detailed description of substitutions and preferred embodiments
EDPDYVCMK

SEQ ID NO: 5111 - protein, 9 aa, Artificial Sequence
  Description of Artificial Sequence: Synthetic peptide
  N-term H or Acetyl
  MOD_RES (5)..(5): Tyr or Phospho-Tyr
  MOD_RES (7)..(7): Modified Cys
  See specification as filed for detailed description of substitutions and preferred embodiments
EDPDYVCMP

SEQ ID NO: 5112 - protein, 9 aa, Artificial Sequence
  Description of Artificial Sequence: Synthetic peptide
  N-term H or Acetyl
  MOD_RES (5)..(5): Tyr or Phospho-Tyr
  MOD_RES (7)..(7): Modified Cys
  See specification as filed for detailed description of substitutions and preferred embodiments
EDPDYVCVG

SEQ ID NO: 5113 - protein, 9 aa, Artificial Sequence
  Description of Artificial Sequence: Synthetic peptide
  N-term H or Acetyl
  MOD_RES (5)..(5): Tyr or Phospho-Tyr
  MOD_RES (7)..(7): Modified Cys
  See specification as filed for detailed description of substitutions and preferred embodiments
EDPDYVCVK

SEQ ID NO: 5114 - protein, 9 aa, Artificial Sequence
  Description of Artificial Sequence: Synthetic peptide
  N-term H or Acetyl
  MOD_RES (5)..(5): Tyr or Phospho-Tyr
  MOD_RES (7)..(7): Modified Cys
  See specification as filed for detailed description of substitutions and preferred embodiments
EDPDYVCVP

SEQ ID NO: 5115 - protein, 9 aa, Artificial Sequence
  Description of Artificial Sequence: Synthetic peptide
  N-term H or Acetyl
  MOD_RES (5)..(5): Tyr or Phospho-Tyr
  MOD_RES (7)..(7): Modified Cys
  See specification as filed for detailed description of substitutions and preferred embodiments
EDPEYFCFG

SEQ ID NO: 5116 - protein, 9 aa, Artificial Sequence
  Description of Artificial Sequence: Synthetic peptide
  N-term H or Acetyl
  MOD_RES (5)..(5): Tyr or Phospho-Tyr
  MOD_RES (7)..(7): Modified Cys
  See specification as filed for detailed description of substitutions and preferred embodiments
EDPEYFCFK

SEQ ID NO: 5117 - protein, 9 aa, Artificial Sequence
  Description of Artificial Sequence: Synthetic peptide
  N-term H or Acetyl
  MOD_RES (5)..(5): Tyr or Phospho-Tyr
  MOD_RES (7)..(7): Modified Cys
  See specification as filed for detailed description of substitutions and preferred embodiments
EDPEYFCFP

SEQ ID NO: 5118 - protein, 9 aa, Artificial Sequence
  Description of Artificial Sequence: Synthetic peptide
  N-term H or Acetyl
  MOD_RES (5)..(5): Tyr or Phospho-Tyr
  MOD_RES (7)..(7): Modified Cys
  See specification as filed for detailed description of substitutions and preferred embodiments
EDPEYFCIG

SEQ ID NO: 5119 - protein, 9 aa, Artificial Sequence
  Description of Artificial Sequence: Synthetic peptide
  N-term H or Acetyl
  MOD_RES (5)..(5): Tyr or Phospho-Tyr
  MOD_RES (7)..(7): Modified Cys
  See specification as filed for detailed description of substitutions and preferred embodiments
EDPEYFCIK

SEQ ID NO: 5120 - protein, 9 aa, Artificial Sequence
  Description of Artificial Sequence: Synthetic peptide
  N-term H or Acetyl
  MOD_RES (5)..(5): Tyr or Phospho-Tyr
  MOD_RES (7)..(7): Modified Cys
  See specification as filed for detailed description of substitutions and preferred embodiments
EDPEYFCIP

SEQ ID NO: 5121 - protein, 9 aa, Artificial Sequence
  Description of Artificial Sequence: Synthetic peptide
  N-term H or Acetyl
  MOD_RES (5)..(5): Tyr or Phospho-Tyr
  MOD_RES (7)..(7): Modified Cys
  See specification as filed for detailed description of substitutions and preferred embodiments
EDPEYFCMG

SEQ ID NO: 5122 - protein, 9 aa, Artificial Sequence
  Description of Artificial Sequence: Synthetic peptide
  N-term H or Acetyl
  MOD_RES (5)..(5): Tyr or Phospho-Tyr
  MOD_RES (7)..(7): Modified Cys
  See specification as filed for detailed description of substitutions and preferred embodiments
EDPEYFCMK

SEQ ID NO: 5123 - protein, 9 aa, Artificial Sequence
  Description of Artificial Sequence: Synthetic peptide
  N-term H or Acetyl
  MOD_RES (5)..(5): Tyr or Phospho-Tyr
  MOD_RES (7)..(7): Modified Cys
  See specification as filed for detailed description of substitutions and preferred embodiments
EDPEYFCMP

SEQ ID NO: 5124 - protein, 9 aa, Artificial Sequence
  Description of Artificial Sequence: Synthetic peptide
  N-term H or Acetyl
  MOD_RES (5)..(5): Tyr or Phospho-Tyr
  MOD_RES (7)..(7): Modified Cys
  See specification as filed for detailed description of substitutions and preferred embodiments
EDPEYFCVG

SEQ ID NO: 5125 - protein, 9 aa, Artificial Sequence
  Description of Artificial Sequence: Synthetic peptide
  N-term H or Acetyl
  MOD_RES (5)..(5): Tyr or Phospho-Tyr
  MOD_RES (7)..(7): Modified Cys
  See specification as filed for detailed description of substitutions and preferred embodiments
EDPEYFCVK

SEQ ID NO: 5126 - protein, 9 aa, Artificial Sequence
  Description of Artificial Sequence: Synthetic peptide
  N-term H or Acetyl
  MOD_RES (5)..(5): Tyr or Phospho-Tyr
  MOD_RES (7)..(7): Modified Cys
  See specification as filed for detailed description of substitutions and preferred embodiments
EDPEYFCVP

SEQ ID NO: 5127 - protein, 9 aa, Artificial Sequence
  Description of Artificial Sequence: Synthetic peptide
  N-term H or Acetyl
  MOD_RES (5)..(5): Tyr or Phospho-Tyr
  MOD_RES (7)..(7): Modified Cys
  See specification as filed for detailed description of substitutions and preferred embodiments
EDPEYICFG

SEQ ID NO: 5128 - protein, 9 aa, Artificial Sequence
  Description of Artificial Sequence: Synthetic peptide
  N-term H or Acetyl
  MOD_RES (5)..(5): Tyr or Phospho-Tyr
  MOD_RES (7)..(7): Modified Cys
  See specification as filed for detailed description of substitutions and preferred embodiments
EDPEYICFK

SEQ ID NO: 5129 - protein, 9 aa, Artificial Sequence
  Description of Artificial Sequence: Synthetic peptide
  N-term H or Acetyl
  MOD_RES (5)..(5): Tyr or Phospho-Tyr
  MOD_RES (7)..(7): Modified Cys
  See specification as filed for detailed description of substitutions and preferred embodiments
EDPEYICFP

SEQ ID NO: 5130 - protein, 9 aa, Artificial Sequence
  Description of Artificial Sequence: Synthetic peptide
  N-term H or Acetyl
  MOD_RES (5)..(5): Tyr or Phospho-Tyr
  MOD_RES (7)..(7): Modified Cys
  See specification as filed for detailed description of substitutions and preferred embodiments
EDPEYICIG

SEQ ID NO: 5131 - protein, 9 aa, Artificial Sequence
  Description of Artificial Sequence: Synthetic peptide
  N-term H or Acetyl
  MOD_RES (5)..(5): Tyr or Phospho-Tyr
  MOD_RES (7)..(7): Modified Cys
  See specification as filed for detailed description of substitutions and preferred embodiments
EDPEYICIK

SEQ ID NO: 5132 - protein, 9 aa, Artificial Sequence
  Description of Artificial Sequence: Synthetic peptide
  N-term H or Acetyl
  MOD_RES (5)..(5): Tyr or Phospho-Tyr
  MOD_RES (7)..(7): Modified Cys
  See specification as filed for detailed description of substitutions and preferred embodiments
EDPEYICIP

SEQ ID NO: 5133 - protein, 9 aa, Artificial Sequence
  Description of Artificial Sequence: Synthetic peptide
  N-term H or Acetyl
  MOD_RES (5)..(5): Tyr or Phospho-Tyr
  MOD_RES (7)..(7): Modified Cys
  See specification as filed for detailed description of substitutions and preferred embodiments
EDPEYICMG

SEQ ID NO: 5134 - protein, 9 aa, Artificial Sequence
  Description of Artificial Sequence: Synthetic peptide
  N-term H or Acetyl
  MOD_RES (5)..(5): Tyr or Phospho-Tyr
  MOD_RES (7)..(7): Modified Cys
  See specification as filed for detailed description of substitutions and preferred embodiments
EDPEYICMK

SEQ ID NO: 5135 - protein, 9 aa, Artificial Sequence
  Description of Artificial Sequence: Synthetic peptide
  N-term H or Acetyl
  MOD_RES (5)..(5): Tyr or Phospho-Tyr
  MOD_RES (7)..(7): Modified Cys
  See specification as filed for detailed description of substitutions and preferred embodiments
EDPEYICMP

SEQ ID NO: 5136 - protein, 9 aa, Artificial Sequence
  Description of Artificial Sequence: Synthetic peptide
  N-term H or Acetyl
  MOD_RES (5)..(5): Tyr or Phospho-Tyr
  MOD_RES (7)..(7): Modified Cys
  See specification as filed for detailed description of substitutions and preferred embodiments
EDPEYICVG

SEQ ID NO: 5137 - protein, 9 aa, Artificial Sequence
  Description of Artificial Sequence: Synthetic peptide
  N-term H or Acetyl
  MOD_RES (5)..(5): Tyr or Phospho-Tyr
  MOD_RES (7)..(7): Modified Cys
  See specification as filed for detailed description of substitutions and preferred embodiments
EDPEYICVK

SEQ ID NO: 5138 - protein, 9 aa, Artificial Sequence
  Description of Artificial Sequence: Synthetic peptide
  N-term H or Acetyl
  MOD_RES (5)..(5): Tyr or Phospho-Tyr
  MOD_RES (7)..(7): Modified Cys
  See specification as filed for detailed description of substitutions and preferred embodiments
EDPEYICVP

SEQ ID NO: 5139 - protein, 9 aa, Artificial Sequence
  Description of Artificial Sequence: Synthetic peptide
  N-term H or Acetyl
  MOD_RES (5)..(5): Tyr or Phospho-Tyr
  MOD_RES (7)..(7): Modified Cys
  See specification as filed for detailed description of substitutions and preferred embodiments
EDPEYVCFG

SEQ ID NO: 5140 - protein, 9 aa, Artificial Sequence
  Description of Artificial Sequence: Synthetic peptide
  N-term H or Acetyl
  MOD_RES (5)..(5): Tyr or Phospho-Tyr
  MOD_RES (7)..(7): Modified Cys
  See specification as filed for detailed description of substitutions and preferred embodiments
EDPEYVCFK

SEQ ID NO: 5141 - protein, 9 aa, Artificial Sequence
  Description of Artificial Sequence: Synthetic peptide
  N-term H or Acetyl
  MOD_RES (5)..(5): Tyr or Phospho-Tyr
  MOD_RES (7)..(7): Modified Cys
  See specification as filed for detailed description of substitutions and preferred embodiments
EDPEYVCFP

SEQ ID NO: 5142 - protein, 9 aa, Artificial Sequence
  Description of Artificial Sequence: Synthetic peptide
  N-term H or Acetyl
  MOD_RES (5)..(5): Tyr or Phospho-Tyr
  MOD_RES (7)..(7): Modified Cys
  See specification as filed for detailed description of substitutions and preferred embodiments
EDPEYVCIG

SEQ ID NO: 5143 - protein, 9 aa, Artificial Sequence
  Description of Artificial Sequence: Synthetic peptide
  N-term H or Acetyl
  MOD_RES (5)..(5): Tyr or Phospho-Tyr
  MOD_RES (7)..(7): Modified Cys
  See specification as filed for detailed description of substitutions and preferred embodiments
EDPEYVCIK

SEQ ID NO: 5144 - protein, 9 aa, Artificial Sequence
  Description of Artificial Sequence: Synthetic peptide
  N-term H or Acetyl
  MOD_RES (5)..(5): Tyr or Phospho-Tyr
  MOD_RES (7)..(7): Modified Cys
  See specification as filed for detailed description of substitutions and preferred embodiments
EDPEYVCIP

SEQ ID NO: 5145 - protein, 9 aa, Artificial Sequence
  Description of Artificial Sequence: Synthetic peptide
  N-term H or Acetyl
  MOD_RES (5)..(5): Tyr or Phospho-Tyr
  MOD_RES (7)..(7): Modified Cys
  See specification as filed for detailed description of substitutions and preferred embodiments
EDPEYVCMG

SEQ ID NO: 5146 - protein, 9 aa, Artificial Sequence
  Description of Artificial Sequence: Synthetic peptide
  N-term H or Acetyl
  MOD_RES (5)..(5): Tyr or Phospho-Tyr
  MOD_RES (7)..(7): Modified Cys
  See specification as filed for detailed description of substitutions and preferred embodiments
EDPEYVCMK

SEQ ID NO: 5147 - protein, 9 aa, Artificial Sequence
  Description of Artificial Sequence: Synthetic peptide
  N-term H or Acetyl
  MOD_RES (5)..(5): Tyr or Phospho-Tyr
  MOD_RES (7)..(7): Modified Cys
  See specification as filed for detailed description of substitutions and preferred embodiments
EDPEYVCMP

SEQ ID NO: 5148 - protein, 9 aa, Artificial Sequence
  Description of Artificial Sequence: Synthetic peptide
  N-term H or Acetyl
  MOD_RES (5)..(5): Tyr or Phospho-Tyr
  MOD_RES (7)..(7): Modified Cys
  See specification as filed for detailed description of substitutions and preferred embodiments
EDPEYVCVG

SEQ ID NO: 5149 - protein, 9 aa, Artificial Sequence
  Description of Artificial Sequence: Synthetic peptide
  N-term H or Acetyl
  MOD_RES (5)..(5): Tyr or Phospho-Tyr
  MOD_RES (7)..(7): Modified Cys
  See specification as filed for detailed description of substitutions and preferred embodiments
EDPEYVCVK

SEQ ID NO: 5150 - protein, 9 aa, Artificial Sequence
  Description of Artificial Sequence: Synthetic peptide
  N-term H or Acetyl
  MOD_RES (5)..(5): Tyr or Phospho-Tyr
  MOD_RES (7)..(7): Modified Cys
  See specification as filed for detailed description of substitutions and preferred embodiments
EDPEYVCVP

SEQ ID NO: 5151 - protein, 9 aa, Artificial Sequence
  Description of Artificial Sequence: Synthetic peptide
  N-term H or Acetyl
  MOD_RES (5)..(5): Tyr or Phospho-Tyr
  MOD_RES (7)..(7): Modified Cys
  See specification as filed for detailed description of substitutions and preferred embodiments
EDPIYFCFG

SEQ ID NO: 5152 - protein, 9 aa, Artificial Sequence
  Description of Artificial Sequence: Synthetic peptide
  N-term H or Acetyl
  MOD_RES (5)..(5): Tyr or Phospho-Tyr
  MOD_RES (7)..(7): Modified Cys
  See specification as filed for detailed description of substitutions and preferred embodiments
EDPIYFCFK

SEQ ID NO: 5153 - protein, 9 aa, Artificial Sequence
  Description of Artificial Sequence: Synthetic peptide
  N-term H or Acetyl
  MOD_RES (5)..(5): Tyr or Phospho-Tyr
  MOD_RES (7)..(7): Modified Cys
  See specification as filed for detailed description of substitutions and preferred embodiments
EDPIYFCFP

SEQ ID NO: 5154 - protein, 9 aa, Artificial Sequence
  Description of Artificial Sequence: Synthetic peptide
  N-term H or Acetyl
  MOD_RES (5)..(5): Tyr or Phospho-Tyr
  MOD_RES (7)..(7): Modified Cys
  See specification as filed for detailed description of substitutions and preferred embodiments
EDPIYFCIG

SEQ ID NO: 5155 - protein, 9 aa, Artificial Sequence
  Description of Artificial Sequence: Synthetic peptide
  N-term H or Acetyl
  MOD_RES (5)..(5): Tyr or Phospho-Tyr
  MOD_RES (7)..(7): Modified Cys
  See specification as filed for detailed description of substitutions and preferred embodiments
EDPIYFCIK

SEQ ID NO: 5156 - protein, 9 aa, Artificial Sequence
  Description of Artificial Sequence: Synthetic peptide
  N-term H or Acetyl
  MOD_RES (5)..(5): Tyr or Phospho-Tyr
  MOD_RES (7)..(7): Modified Cys
  See specification as filed for detailed description of substitutions and preferred embodiments
EDPIYFCIP

SEQ ID NO: 5157 - protein, 9 aa, Artificial Sequence
  Description of Artificial Sequence: Synthetic peptide
  N-term H or Acetyl
  MOD_RES (5)..(5): Tyr or Phospho-Tyr
  MOD_RES (7)..(7): Modified Cys
  See specification as filed for detailed description of substitutions and preferred embodiments
EDPIYFCMG

SEQ ID NO: 5158 - protein, 9 aa, Artificial Sequence
  Description of Artificial Sequence: Synthetic peptide
  N-term H or Acetyl
  MOD_RES (5)..(5): Tyr or Phospho-Tyr
  MOD_RES (7)..(7): Modified Cys
  See specification as filed for detailed description of substitutions and preferred embodiments
EDPIYFCMK

SEQ ID NO: 5159 - protein, 9 aa, Artificial Sequence
  Description of Artificial Sequence: Synthetic peptide
  N-term H or Acetyl
  MOD_RES (5)..(5): Tyr or Phospho-Tyr
  MOD_RES (7)..(7): Modified Cys
  See specification as filed for detailed description of substitutions and preferred embodiments
EDPIYFCMP

SEQ ID NO: 5160 - protein, 9 aa, Artificial Sequence
  Description of Artificial Sequence: Synthetic peptide
  N-term H or Acetyl
  MOD_RES (5)..(5): Tyr or Phospho-Tyr
  MOD_RES (7)..(7): Modified Cys
  See specification as filed for detailed description of substitutions and preferred embodiments
EDPIYFCVG

SEQ ID NO: 5161 - protein, 9 aa, Artificial Sequence
  Description of Artificial Sequence: Synthetic peptide
  N-term H or Acetyl
  MOD_RES (5)..(5): Tyr or Phospho-Tyr
  MOD_RES (7)..(7): Modified Cys
  See specification as filed for detailed description of substitutions and preferred embodiments
EDPIYFCVK

SEQ ID NO: 5162 - protein, 9 aa, Artificial Sequence
  Description of Artificial Sequence: Synthetic peptide
  N-term H or Acetyl
  MOD_RES (5)..(5): Tyr or Phospho-Tyr
  MOD_RES (7)..(7): Modified Cys
  See specification as filed for detailed description of substitutions and preferred embodiments
EDPIYFCVP

SEQ ID NO: 5163 - protein, 9 aa, Artificial Sequence
  Description of Artificial Sequence: Synthetic peptide
  N-term H or Acetyl
  MOD_RES (5)..(5): Tyr or Phospho-Tyr
  MOD_RES (7)..(7): Modified Cys
  See specification as filed for detailed description of substitutions and preferred embodiments
EDPIYICFG

SEQ ID NO: 5164 - protein, 9 aa, Artificial Sequence
  Description of Artificial Sequence: Synthetic peptide
  N-term H or Acetyl
  MOD_RES (5)..(5): Tyr or Phospho-Tyr
  MOD_RES (7)..(7): Modified Cys
  See specification as filed for detailed description of substitutions and preferred embodiments
EDPIYICFK

SEQ ID NO: 5165 - protein, 9 aa, Artificial Sequence
  Description of Artificial Sequence: Synthetic peptide
  N-term H or Acetyl
  MOD_RES (5)..(5): Tyr or Phospho-Tyr
  MOD_RES (7)..(7): Modified Cys
  See specification as filed for detailed description of substitutions and preferred embodiments
EDPIYICFP

SEQ ID NO: 5166 - protein, 9 aa, Artificial Sequence
  Description of Artificial Sequence: Synthetic peptide
  N-term H or Acetyl
  MOD_RES (5)..(5): Tyr or Phospho-Tyr
  MOD_RES (7)..(7): Modified Cys
  See specification as filed for detailed description of substitutions and preferred embodiments
EDPIYICIG

SEQ ID NO: 5167 - protein, 9 aa, Artificial Sequence
  Description of Artificial Sequence: Synthetic peptide
  N-term H or Acetyl
  MOD_RES (5)..(5): Tyr or Phospho-Tyr
  MOD_RES (7)..(7): Modified Cys
  See specification as filed for detailed description of substitutions and preferred embodiments
EDPIYICIK

SEQ ID NO: 5168 - protein, 9 aa, Artificial Sequence
  Description of Artificial Sequence: Synthetic peptide
  N-term H or Acetyl
  MOD_RES (5)..(5): Tyr or Phospho-Tyr
  MOD_RES (7)..(7): Modified Cys
  See specification as filed for detailed description of substitutions and preferred embodiments
EDPIYICIP

SEQ ID NO: 5169 - protein, 9 aa, Artificial Sequence
  Description of Artificial Sequence: Synthetic peptide
  N-term H or Acetyl
  MOD_RES (5)..(5): Tyr or Phospho-Tyr
  MOD_RES (7)..(7): Modified Cys
  See specification as filed for detailed description of substitutions and preferred embodiments
EDPIYICMG

SEQ ID NO: 5170 - protein, 9 aa, Artificial Sequence
  Description of Artificial Sequence: Synthetic peptide
  N-term H or Acetyl
  MOD_RES (5)..(5): Tyr or Phospho-Tyr
  MOD_RES (7)..(7): Modified Cys
  See specification as filed for detailed description of substitutions and preferred embodiments
EDPIYICMK

SEQ ID NO: 5171 - protein, 9 aa, Artificial Sequence
  Description of Artificial Sequence: Synthetic peptide
  N-term H or Acetyl
  MOD_RES (5)..(5): Tyr or Phospho-Tyr
  MOD_RES (7)..(7): Modified Cys
  See specification as filed for detailed description of substitutions and preferred embodiments
EDPIYICMP

SEQ ID NO: 5172 - protein, 9 aa, Artificial Sequence
  Description of Artificial Sequence: Synthetic peptide
  N-term H or Acetyl
  MOD_RES (5)..(5): Tyr or Phospho-Tyr
  MOD_RES (7)..(7): Modified Cys
  See specification as filed for detailed description of substitutions and preferred embodiments
EDPIYICVG

SEQ ID NO: 5173 - protein, 9 aa, Artificial Sequence
  Description of Artificial Sequence: Synthetic peptide
  N-term H or Acetyl
  MOD_RES (5)..(5): Tyr or Phospho-Tyr
  MOD_RES (7)..(7): Modified Cys
  See specification as filed for detailed description of substitutions and preferred embodiments
EDPIYICVK

SEQ ID NO: 5174 - protein, 9 aa, Artificial Sequence
  Description of Artificial Sequence: Synthetic peptide
  N-term H or Acetyl
  MOD_RES (5)..(5): Tyr or Phospho-Tyr
  MOD_RES (7)..(7): Modified Cys
  See specification as filed for detailed description of substitutions and preferred embodiments
EDPIYVCFG

SEQ ID NO: 5175 - protein, 9 aa, Artificial Sequence
  Description of Artificial Sequence: Synthetic peptide
  N-term H or Acetyl
  MOD_RES (5)..(5): Tyr or Phospho-Tyr
  MOD_RES (7)..(7): Modified Cys
  See specification as filed for detailed description of substitutions and preferred embodiments
EDPIYVCFK

SEQ ID NO: 5176 - protein, 9 aa, Artificial Sequence
  Description of Artificial Sequence: Synthetic peptide
  N-term H or Acetyl
  MOD_RES (5)..(5): Tyr or Phospho-Tyr
  MOD_RES (7)..(7): Modified Cys
  See specification as filed for detailed description of substitutions and preferred embodiments
EDPIYVCFP

SEQ ID NO: 5177 - protein, 9 aa, Artificial Sequence
  Description of Artificial Sequence: Synthetic peptide
  N-term H or Acetyl
  MOD_RES (5)..(5): Tyr or Phospho-Tyr
  MOD_RES (7)..(7): Modified Cys
  See specification as filed for detailed description of substitutions and preferred embodiments
EDPIYVCIG

SEQ ID NO: 5178 - protein, 9 aa, Artificial Sequence
  Description of Artificial Sequence: Synthetic peptide
  N-term H or Acetyl
  MOD_RES (5)..(5): Tyr or Phospho-Tyr
  MOD_RES (7)..(7): Modified Cys
  See specification as filed for detailed description of substitutions and preferred embodiments
EDPIYVCIK

SEQ ID NO: 5179 - protein, 9 aa, Artificial Sequence
  Description of Artificial Sequence: Synthetic peptide
  N-term H or Acetyl
  MOD_RES (5)..(5): Tyr or Phospho-Tyr
  MOD_RES (7)..(7): Modified Cys
  See specification as filed for detailed description of substitutions and preferred embodiments
EDPIYVCIP

SEQ ID NO: 5180 - protein, 9 aa, Artificial Sequence
  Description of Artificial Sequence: Synthetic peptide
  N-term H or Acetyl
  MOD_RES (5)..(5): Tyr or Phospho-Tyr
  MOD_RES (7)..(7): Modified Cys
  See specification as filed for detailed description of substitutions and preferred embodiments
EDPIYVCMG

SEQ ID NO: 5181 - protein, 9 aa, Artificial Sequence
  Description of Artificial Sequence: Synthetic peptide
  N-term H or Acetyl
  MOD_RES (5)..(5): Tyr or Phospho-Tyr
  MOD_RES (7)..(7): Modified Cys
  See specification as filed for detailed description of substitutions and preferred embodiments
EDPIYVCMK

SEQ ID NO: 5182 - protein, 9 aa, Artificial Sequence
  Description of Artificial Sequence: Synthetic peptide
  N-term H or Acetyl
  MOD_RES (5)..(5): Tyr or Phospho-Tyr
  MOD_RES (7)..(7): Modified Cys
  See specification as filed for detailed description of substitutions and preferred embodiments
EDPIYVCMP

SEQ ID NO: 5183 - protein, 9 aa, Artificial Sequence
  Description of Artificial Sequence: Synthetic peptide
  N-term H or Acetyl
  MOD_RES (5)..(5): Tyr or Phospho-Tyr
  MOD_RES (7)..(7): Modified Cys
  See specification as filed for detailed description of substitutions and preferred embodiments
EDPIYVCVG

SEQ ID NO: 5184 - protein, 9 aa, Artificial Sequence
  Description of Artificial Sequence: Synthetic peptide
  N-term H or Acetyl
  MOD_RES (5)..(5): Tyr or Phospho-Tyr
  MOD_RES (7)..(7): Modified Cys
  See specification as filed for detailed description of substitutions and preferred embodiments
EDPIYVCVK

SEQ ID NO: 5185 - protein, 9 aa, Artificial Sequence
  Description of Artificial Sequence: Synthetic peptide
  N-term H or Acetyl
  MOD_RES (5)..(5): Tyr or Phospho-Tyr
  MOD_RES (7)..(7): Modified Cys
  See specification as filed for detailed description of substitutions and preferred embodiments
EDPIYVCVP

SEQ ID NO: 5186 - protein, 15 aa, Artificial Sequence
  Description of Artificial Sequence: Synthetic peptide
  N-term H or Acetyl
  MOD_RES (8)..(8): Tyr or Phospho-Tyr
  MOD_RES (10)..(10): Modified Cys
  See specification as filed for detailed description of substitutions and preferred embodiments
EDSFLQRYSCDPTGA

SEQ ID NO: 5187 - protein, 8 aa, Artificial Sequence
  Description of Artificial Sequence: Synthetic peptide
  N-term H or Acetyl
  MOD_RES (6)..(6): Tyr or Phospho-Tyr
  MOD_RES (8)..(8): Modified Cys
  See specification as filed for detailed description of substitutions and preferred embodiments
EEEEEYIC

SEQ ID NO: 5188 - protein, 9 aa, Artificial Sequence
  Description of Artificial Sequence: Synthetic peptide
  N-term H or Acetyl
  MOD_RES (5)..(5): Tyr or Phospho-Tyr
  MOD_RES (6)..(6): Leu or Nle (i.e. isomer of Leucine)
  MOD_RES (7)..(7): Modified Cys
  See specification as filed for detailed description of substitutions and preferred embodiments
EEEEYLCVG

SEQ ID NO: 5189 - protein, 10 aa, Artificial Sequence
  Description of Artificial Sequence: Synthetic peptide
  N-term H or Acetyl
  MOD_RES (5)..(5): Tyr or Phospho-Tyr
  MOD_RES (6)..(6): Leu or Nle (i.e. isomer of Leucine)
  MOD_RES (8)..(8): Pro or d-isoform of Pro
  MOD_RES (9)..(9): Modified Cys
  See specification as filed for detailed description of substitutions and preferred embodiments
EEEEYLQPCG

SEQ ID NO: 5190 - protein, 10 aa, Artificial Sequence
  Description of Artificial Sequence: Synthetic peptide
  N-term H or Acetyl
  MOD_RES (5)..(5): Tyr or Phospho-Tyr
  MOD_RES (6)..(6): Leu or Nle (i.e. isomer of Leucine)
  MOD_RES (8)..(8): Modified Cys
  See specification as filed for detailed description of substitutions and preferred embodiments
EEEEYLQCVG

SEQ ID NO: 5191 - protein, 9 aa, Artificial Sequence
  Description of Artificial Sequence: Synthetic peptide
  N-term H or Acetyl
  MOD_RES (5)..(5): Tyr or Phospho-Tyr
  MOD_RES (7)..(7): Modified Cys
  See specification as filed for detailed description of substitutions and preferred embodiments
EEEEYACVG

SEQ ID NO: 5192 - protein, 10 aa, Artificial Sequence
  Description of Artificial Sequence: Synthetic peptide
  N-term H or Acetyl
  MOD_RES (5)..(5): Tyr or Phospho-Tyr
  MOD_RES (8)..(8): Pro or d-isoform of Pro
  MOD_RES (9)..(9): Modified Cys
  See specification as filed for detailed description of substitutions and preferred embodiments
EEEEYAQPCG

SEQ ID NO: 5193 - protein, 10 aa, Artificial Sequence
  Description of Artificial Sequence: Synthetic peptide
  N-term H or Acetyl
  MOD_RES (5)..(5): Tyr or Phospho-Tyr
  MOD_RES (8)..(8): Modified Cys
  See specification as filed for detailed description of substitutions and preferred embodiments
EEEEYAQCVG

SEQ ID NO: 5194 - protein, 9 aa, Artificial Sequence
  Description of Artificial Sequence: Synthetic peptide
  N-term H or Acetyl
  MOD_RES (5)..(5): Tyr or Phospho-Tyr
  MOD_RES (7)..(7): Modified Cys
  See specification as filed for detailed description of substitutions and preferred embodiments
EEEEYDCVG

SEQ ID NO: 5195 - protein, 10 aa, Artificial Sequence
  Description of Artificial Sequence: Synthetic peptide
  N-term H or Acetyl
  MOD_RES (5)..(5): Tyr or Phospho-Tyr
  MOD_RES (8)..(8): Pro or d-isoform of Pro
  MOD_RES (9)..(9): Modified Cys
  See specification as filed for detailed description of substitutions and preferred embodiments
EEEEYDQPCG

SEQ ID NO: 5196 - protein, 10 aa, Artificial Sequence
  Description of Artificial Sequence: Synthetic peptide
  N-term H or Acetyl
  MOD_RES (5)..(5): Tyr or Phospho-Tyr
  MOD_RES (8)..(8): Modified Cys
  See specification as filed for detailed description of substitutions and preferred embodiments
EEEEYDQCVG

SEQ ID NO: 5197 - protein, 9 aa, Artificial Sequence
  Description of Artificial Sequence: Synthetic peptide
  N-term H or Acetyl
  MOD_RES (5)..(5): Tyr or Phospho-Tyr
  MOD_RES (7)..(7): Modified Cys
  See specification as filed for detailed description of substitutions and preferred embodiments
EEEEYECVG

SEQ ID NO: 5198 - protein, 10 aa, Artificial Sequence
  Description of Artificial Sequence: Synthetic peptide
  N-term H or Acetyl
  MOD_RES (5)..(5): Tyr or Phospho-Tyr
  MOD_RES (8)..(8): Pro or d-isoform of Pro
  MOD_RES (9)..(9): Modified Cys
  See specification as filed for detailed description of substitutions and preferred embodiments
EEEEYEQPCG

SEQ ID NO: 5199 - protein, 10 aa, Artificial Sequence
  Description of Artificial Sequence: Synthetic peptide
  N-term H or Acetyl
  MOD_RES (5)..(5): Tyr or Phospho-Tyr
  MOD_RES (8)..(8): Modified Cys
  See specification as filed for detailed description of substitutions and preferred embodiments
EEEEYEQCVG

SEQ ID NO: 5200 - protein, 9 aa, Artificial Sequence
  Description of Artificial Sequence: Synthetic peptide
  N-term H or Acetyl
  MOD_RES (5)..(5): Tyr or Phospho-Tyr
  MOD_RES (7)..(7): Modified Cys
  See specification as filed for detailed description of substitutions and preferred embodiments
EEEEYFCVG

SEQ ID NO: 5201 - protein, 10 aa, Artificial Sequence
  Description of Artificial Sequence: Synthetic peptide
  N-term H or Acetyl
  MOD_RES (5)..(5): Tyr or Phospho-Tyr
  MOD_RES (8)..(8): Pro or d-isoform of Pro
  MOD_RES (9)..(9): Modified Cys
  See specification as filed for detailed description of substitutions and preferred embodiments
EEEEYFQPCG

SEQ ID NO: 5202 - protein, 10 aa, Artificial Sequence
  Description of Artificial Sequence: Synthetic peptide
  N-term H or Acetyl
  MOD_RES (5)..(5): Tyr or Phospho-Tyr
  MOD_RES (8)..(8): Modified Cys
  See specification as filed for detailed description of substitutions and preferred embodiments
EEEEYFQCVG

SEQ ID NO: 5203 - protein, 9 aa, Artificial Sequence
  Description of Artificial Sequence: Synthetic peptide
  N-term H or Acetyl
  MOD_RES (5)..(5): Tyr or Phospho-Tyr
  MOD_RES (7)..(7): Modified Cys
  See specification as filed for detailed description of substitutions and preferred embodiments
EEEEYGCVG

SEQ ID NO: 5204 - protein, 10 aa, Artificial Sequence
  Description of Artificial Sequence: Synthetic peptide
  N-term H or Acetyl
  MOD_RES (5)..(5): Tyr or Phospho-Tyr
  MOD_RES (8)..(8): Pro or d-isoform of Pro
  MOD_RES (9)..(9): Modified Cys
  See specification as filed for detailed description of substitutions and preferred embodiments
EEEEYGGPCG

SEQ ID NO: 5205 - protein, 10 aa, Artificial Sequence
  Description of Artificial Sequence: Synthetic peptide
  N-term H or Acetyl
  MOD_RES (5)..(5): Tyr or Phospho-Tyr
  MOD_RES (8)..(8): Modified Cys
  See specification as filed for detailed description of substitutions and preferred embodiments
EEEEYGGCVG

SEQ ID NO: 5206 - protein, 10 aa, Artificial Sequence
  Description of Artificial Sequence: Synthetic peptide
  N-term H or Acetyl
  MOD_RES (5)..(5): Tyr or Phospho-Tyr
  MOD_RES (9)..(9): Modified Cys
  See specification as filed for detailed description of substitutions and preferred embodiments
EEEEYGGGCG

SEQ ID NO: 5207 - protein, 10 aa, Artificial Sequence
  Description of Artificial Sequence: Synthetic peptide
  N-term H or Acetyl
  MOD_RES (5)..(5): Tyr or Phospho-Tyr
  MOD_RES (8)..(8): Pro or d-isoform of Pro
  MOD_RES (9)..(9): Modified Cys
  See specification as filed for detailed description of substitutions and preferred embodiments
EEEEYGQPCG

SEQ ID NO: 5208 - protein, 10 aa, Artificial Sequence
  Description of Artificial Sequence: Synthetic peptide
  N-term H or Acetyl
  MOD_RES (5)..(5): Tyr or Phospho-Tyr
  MOD_RES (8)..(8): Modified Cys
  See specification as filed for detailed description of substitutions and preferred embodiments
EEEEYGQCVG

SEQ ID NO: 5209 - protein, 9 aa, Artificial Sequence
  Description of Artificial Sequence: Synthetic peptide
  N-term H or Acetyl
  MOD_RES (5)..(5): Tyr or Phospho-Tyr
  MOD_RES (7)..(7): Modified Cys
  See specification as filed for detailed description of substitutions and preferred embodiments
EEEEYHCVG

SEQ ID NO: 5210 - protein, 10 aa, Artificial Sequence
  Description of Artificial Sequence: Synthetic peptide
  N-term H or Acetyl
  MOD_RES (5)..(5): Tyr or Phospho-Tyr
  MOD_RES (8)..(8): Pro or d-isoform of Pro
  MOD_RES (9)..(9): Modified Cys
  See specification as filed for detailed description of substitutions and preferred embodiments
EEEEYHQPCG

SEQ ID NO: 5211 - protein, 10 aa, Artificial Sequence
  Description of Artificial Sequence: Synthetic peptide
  N-term H or Acetyl
  MOD_RES (5)..(5): Tyr or Phospho-Tyr
  MOD_RES (8)..(8): Modified Cys
  See specification as filed for detailed description of substitutions and preferred embodiments
EEEEYHQCVG

SEQ ID NO: 5212 - protein, 10 aa, Artificial Sequence
  Description of Artificial Sequence: Synthetic peptide
  N-term H or Acetyl
  MOD_RES (5)..(5): Tyr or Phospho-Tyr
  MOD_RES (7)..(7): Leu or Nle (i.e. isomer of Leucine)
  MOD_RES (8)..(8): Pro or d-isoform of Pro
  MOD_RES (9)..(9): Modified Cys
  See specification as filed for detailed description of substitutions and preferred embodiments
EEEEYILPCG

SEQ ID NO: 5213 - protein, 10 aa, Artificial Sequence
  Description of Artificial Sequence: Synthetic peptide
  N-term H or Acetyl
  MOD_RES (5)..(5): Tyr or Phospho-Tyr
  MOD_RES (7)..(7): Leu or Nle (i.e. isomer of Leucine)
  MOD_RES (8)..(8): Modified Cys
  See specification as filed for detailed description of substitutions and preferred embodiments
EEEEYILCVG

SEQ ID NO: 5214 - protein, 10 aa, Artificial Sequence
  Description of Artificial Sequence: Synthetic peptide
  N-term H or Acetyl
  MOD_RES (5)..(5): Tyr or Phospho-Tyr
  MOD_RES (8)..(8): Pro or d-isoform of Pro
  MOD_RES (9)..(9): Modified Cys
  See specification as filed for detailed description of substitutions and preferred embodiments
EEEEYIAPCG

SEQ ID NO: 5215 - protein, 10 aa, Artificial Sequence
  Description of Artificial Sequence: Synthetic peptide
  N-term H or Acetyl
  MOD_RES (5)..(5): Tyr or Phospho-Tyr
  MOD_RES (8)..(8): Modified Cys
  See specification as filed for detailed description of substitutions and preferred embodiments
EEEEYIACVG

SEQ ID NO: 5216 - protein, 9 aa, Artificial Sequence
  Description of Artificial Sequence: Synthetic peptide
  N-term H or Acetyl
  MOD_RES (5)..(5): Tyr or Phospho-Tyr
  MOD_RES (7)..(7): Modified Cys
  See specification as filed for detailed description of substitutions and preferred embodiments
EEEEYICEV

SEQ ID NO: 5217 - protein, 9 aa, Artificial Sequence
  Description of Artificial Sequence: Synthetic peptide
  N-term H or Acetyl
  MOD_RES (5)..(5): Tyr or Phospho-Tyr
  MOD_RES (7)..(7): Modified Cys
  See specification as filed for detailed description of substitutions and preferred embodiments
EEEEYICIV

SEQ ID NO: 5218 - protein, 10 aa, Artificial Sequence
  Description of Artificial Sequence: Synthetic peptide
  N-term H or Acetyl
  MOD_RES (5)..(5): Tyr or Phospho-Tyr
  MOD_RES (8)..(8): Pro or d-isoform of Pro
  MOD_RES (9)..(9): Modified Cys
  See specification as filed for detailed description of substitutions and preferred embodiments
EEEEYIDPCG

SEQ ID NO: 5219 - protein, 10 aa, Artificial Sequence
  Description of Artificial Sequence: Synthetic peptide
  N-term H or Acetyl
  MOD_RES (5)..(5): Tyr or Phospho-Tyr
  MOD_RES (8)..(8): Modified Cys
  See specification as filed for detailed description of substitutions and preferred embodiments
EEEEYIDCVG

SEQ ID NO: 5220 - protein, 10 aa, Artificial Sequence
  Description of Artificial Sequence: Synthetic peptide
  N-term H or Acetyl
  MOD_RES (5)..(5): Tyr or Phospho-Tyr
  MOD_RES (8)..(8): Pro or d-isoform of Pro
  MOD_RES (9)..(9): Modified Cys
  See specification as filed for detailed description of substitutions and preferred embodiments
EEEEYIEPCG

SEQ ID NO: 5221 - protein, 10 aa, Artificial Sequence
  Description of Artificial Sequence: Synthetic peptide
  N-term H or Acetyl
  MOD_RES (5)..(5): Tyr or Phospho-Tyr
  MOD_RES (8)..(8): Modified Cys
  See specification as filed for detailed description of substitutions and preferred embodiments
EEEEYIECVG

SEQ ID NO: 5222 - protein, 10 aa, Artificial Sequence
  Description of Artificial Sequence: Synthetic peptide
  N-term H or Acetyl
  MOD_RES (5)..(5): Tyr or Phospho-Tyr
  MOD_RES (8)..(8): Pro or d-isoform of Pro
  MOD_RES (9)..(9): Modified Cys
  See specification as filed for detailed description of substitutions and preferred embodiments
EEEEYIFPCG

SEQ ID NO: 5223 - protein, 10 aa, Artificial Sequence
  Description of Artificial Sequence: Synthetic peptide
  N-term H or Acetyl
  MOD_RES (5)..(5): Tyr or Phospho-Tyr
  MOD_RES (8)..(8): Modified Cys
  See specification as filed for detailed description of substitutions and preferred embodiments
EEEEYIFCVG

SEQ ID NO: 5224 - protein, 10 aa, Artificial Sequence
  Description of Artificial Sequence: Synthetic peptide
  N-term H or Acetyl
  MOD_RES (5)..(5): Tyr or Phospho-Tyr
  MOD_RES (8)..(8): Pro or d-isoform of Pro
  MOD_RES (9)..(9): Modified Cys
  See specification as filed for detailed description of substitutions and preferred embodiments
EEEEYIGPCG

SEQ ID NO: 5225 - protein, 10 aa, Artificial Sequence
  Description of Artificial Sequence: Synthetic peptide
  N-term H or Acetyl
  MOD_RES (5)..(5): Tyr or Phospho-Tyr
  MOD_RES (8)..(8): Modified Cys
  See specification as filed for detailed description of substitutions and preferred embodiments
EEEEYIGCVG

SEQ ID NO: 5226 - protein, 10 aa, Artificial Sequence
  Description of Artificial Sequence: Synthetic peptide
  N-term H or Acetyl
  MOD_RES (5)..(5): Tyr or Phospho-Tyr
  MOD_RES (8)..(8): Pro or d-isoform of Pro
  MOD_RES (9)..(9): Modified Cys
  See specification as filed for detailed description of substitutions and preferred embodiments
EEEEYIHPCG

SEQ ID NO: 5227 - protein, 10 aa, Artificial Sequence
  Description of Artificial Sequence: Synthetic peptide
  N-term H or Acetyl
  MOD_RES (5)..(5): Tyr or Phospho-Tyr
  MOD_RES (8)..(8): Modified Cys
  See specification as filed for detailed description of substitutions and preferred embodiments
EEEEYIHCVG

SEQ ID NO: 5228 - protein, 10 aa, Artificial Sequence
  Description of Artificial Sequence: Synthetic peptide
  N-term H or Acetyl
  MOD_RES (5)..(5): Tyr or Phospho-Tyr
  MOD_RES (8)..(8): Pro or d-isoform of Pro
  MOD_RES (9)..(9): Modified Cys
  See specification as filed for detailed description of substitutions and preferred embodiments
EEEEYIIPCG

SEQ ID NO: 5229 - protein, 10 aa, Artificial Sequence
  Description of Artificial Sequence: Synthetic peptide
  N-term H or Acetyl
  MOD_RES (5)..(5): Tyr or Phospho-Tyr
  MOD_RES (8)..(8): Modified Cys
  See specification as filed for detailed description of substitutions and preferred embodiments
EEEEYIICVG

SEQ ID NO: 5230 - protein, 10 aa, Artificial Sequence
  Description of Artificial Sequence: Synthetic peptide
  N-term H or Acetyl
  MOD_RES (5)..(5): Tyr or Phospho-Tyr
  MOD_RES (8)..(8): Pro or d-isoform of Pro
  MOD_RES (9)..(9): Modified Cys
  See specification as filed for detailed description of substitutions and preferred embodiments
EEEEYIKPCG

SEQ ID NO: 5231 - protein, 10 aa, Artificial Sequence
  Description of Artificial Sequence: Synthetic peptide
  N-term H or Acetyl
  MOD_RES (5)..(5): Tyr or Phospho-Tyr
  MOD_RES (8)..(8): Modified Cys
  See specification as filed for detailed description of substitutions and preferred embodiments
EEEEYIKCVG

SEQ ID NO: 5232 - protein, 10 aa, Artificial Sequence
  Description of Artificial Sequence: Synthetic peptide
  N-term H or Acetyl
  MOD_RES (5)..(5): Tyr or Phospho-Tyr
  MOD_RES (8)..(8): Pro or d-isoform of Pro
  MOD_RES (9)..(9): Modified Cys
  See specification as filed for detailed description of substitutions and preferred embodiments
EEEEYILPCG

SEQ ID NO: 5233 - protein, 10 aa, Artificial Sequence
  Description of Artificial Sequence: Synthetic peptide
  N-term H or Acetyl
  MOD_RES (5)..(5): Tyr or Phospho-Tyr
  MOD_RES (8)..(8): Modified Cys
  See specification as filed for detailed description of substitutions and preferred embodiments
EEEEYILCVG

SEQ ID NO: 5234 - protein, 10 aa, Artificial Sequence
  Description of Artificial Sequence: Synthetic peptide
  N-term H or Acetyl
  MOD_RES (5)..(5): Tyr or Phospho-Tyr
  MOD_RES (8)..(8): Pro or d-isoform of Pro
  MOD_RES (9)..(9): Modified Cys
  See specification as filed for detailed description of substitutions and preferred embodiments
EEEEYINPCG

SEQ ID NO: 5235 - protein, 10 aa, Artificial Sequence
  Description of Artificial Sequence: Synthetic peptide
  N-term H or Acetyl
  MOD_RES (5)..(5): Tyr or Phospho-Tyr
  MOD_RES (8)..(8): Modified Cys
  See specification as filed for detailed description of substitutions and preferred embodiments
EEEEYINCVG

SEQ ID NO: 5236 - protein, 10 aa, Artificial Sequence
  Description of Artificial Sequence: Synthetic peptide
  N-term H or Acetyl
  MOD_RES (5)..(5): Tyr or Phospho-Tyr
  MOD_RES (8)..(8): Pro or d-isoform of Pro
  MOD_RES (9)..(9): Modified Cys
  See specification as filed for detailed description of substitutions and preferred embodiments
EEEEYIPPCG

SEQ ID NO: 5237 - protein, 10 aa, Artificial Sequence
  Description of Artificial Sequence: Synthetic peptide
  N-term H or Acetyl
  MOD_RES (5)..(5): Tyr or Phospho-Tyr
  MOD_RES (8)..(8): Modified Cys
  See specification as filed for detailed description of substitutions and preferred embodiments
EEEEYIPCVG

SEQ ID NO: 5238 - protein, 10 aa, Artificial Sequence
  Description of Artificial Sequence: Synthetic peptide
  N-term H or Acetyl
  MOD_RES (5)..(5): Tyr or Phospho-Tyr
  MOD_RES (8)..(8): Pro or d-isoform of Pro
  MOD_RES (9)..(9): Modified Cys
  See specification as filed for detailed description of substitutions and preferred embodiments
EEEEYIQPCG

SEQ ID NO: 5239 - protein, 10 aa, Artificial Sequence
  Description of Artificial Sequence: Synthetic peptide
  N-term H or Acetyl
  MOD_RES (5)..(5): Tyr or Phospho-Tyr
  MOD_RES (8)..(8): Leu or Nle (i.e. isomer of Leucine)
  MOD_RES (9)..(9): Modified Cys
  See specification as filed for detailed description of substitutions and preferred embodiments
EEEEYIQLCG

SEQ ID NO: 5240 - protein, 10 aa, Artificial Sequence
  Description of Artificial Sequence: Synthetic peptide
  N-term H or Acetyl
  MOD_RES (5)..(5): Tyr or Phospho-Tyr
  MOD_RES (9)..(9): Modified Cys
  See specification as filed for detailed description of substitutions and preferred embodiments
EEEEYIQACG

SEQ ID NO: 5241 - protein, 10 aa, Artificial Sequence
  Description of Artificial Sequence: Synthetic peptide
  N-term H or Acetyl
  MOD_RES (5)..(5): Tyr or Phospho-Tyr
  MOD_RES (8)..(8): Modified Cys
  See specification as filed for detailed description of substitutions and preferred embodiments
EEEEYIQCVG

SEQ ID NO: 5242 - protein, 10 aa, Artificial Sequence
  Description of Artificial Sequence: Synthetic peptide
  N-term H or Acetyl
  MOD_RES (5)..(5): Tyr or Phospho-Tyr
  MOD_RES (9)..(9): Modified Cys
  See specification as filed for detailed description of substitutions and preferred embodiments
EEEEYIQDCG

SEQ ID NO: 5243 - protein, 10 aa, Artificial Sequence
  Description of Artificial Sequence: Synthetic peptide
  N-term H or Acetyl
  MOD_RES (5)..(5): Tyr or Phospho-Tyr
  MOD_RES (9)..(9): Modified Cys
  See specification as filed for detailed description of substitutions and preferred embodiments
EEEEYIQECG

SEQ ID NO: 5244 - protein, 10 aa, Artificial Sequence
  Description of Artificial Sequence: Synthetic peptide
  N-term H or Acetyl
  MOD_RES (5)..(5): Tyr or Phospho-Tyr
  MOD_RES (9)..(9): Modified Cys
  See specification as filed for detailed description of substitutions and preferred embodiments
EEEEYIQFCG

SEQ ID NO: 5245 - protein, 10 aa, Artificial Sequence
  Description of Artificial Sequence: Synthetic peptide
  N-term H or Acetyl
  MOD_RES (5)..(5): Tyr or Phospho-Tyr
  MOD_RES (9)..(9): Modified Cys
  See specification as filed for detailed description of substitutions and preferred embodiments
EEEEYIQGCG

SEQ ID NO: 5246 - protein, 10 aa, Artificial Sequence
  Description of Artificial Sequence: Synthetic peptide
  N-term H or Acetyl
  MOD_RES (5)..(5): Tyr or Phospho-Tyr
  MOD_RES (9)..(9): Modified Cys
  See specification as filed for detailed description of substitutions and preferred embodiments
EEEEYIQHCG

SEQ ID NO: 5247 - protein, 10 aa, Artificial Sequence
  Description of Artificial Sequence: Synthetic peptide
  N-term H or Acetyl
  MOD_RES (5)..(5): Tyr or Phospho-Tyr
  MOD_RES (9)..(9): Modified Cys
  See specification as filed for detailed description of substitutions and preferred embodiments
EEEEYIQICG

SEQ ID NO: 5248 - protein, 10 aa, Artificial Sequence
  Description of Artificial Sequence: Synthetic peptide
  N-term H or Acetyl
  MOD_RES (5)..(5): Tyr or Phospho-Tyr
  MOD_RES (9)..(9): Modified Cys
  See specification as filed for detailed description of substitutions and preferred embodiments
EEEEYIQKCG

SEQ ID NO: 5249 - protein, 10 aa, Artificial Sequence
  Description of Artificial Sequence: Synthetic peptide
  N-term H or Acetyl
  MOD_RES (5)..(5): Tyr or Phospho-Tyr
  MOD_RES (9)..(9): Modified Cys
  See specification as filed for detailed description of substitutions and preferred embodiments
EEEEYIQLCG

SEQ ID NO: 5250 - protein, 10 aa, Artificial Sequence
  Description of Artificial Sequence: Synthetic peptide
  N-term H or Acetyl
  MOD_RES (5)..(5): Tyr or Phospho-Tyr
  MOD_RES (9)..(9): Modified Cys
  See specification as filed for detailed description of substitutions and preferred embodiments
EEEEYIQNCG

SEQ ID NO: 5251 - protein, 10 aa, Artificial Sequence
  Description of Artificial Sequence: Synthetic peptide
  N-term H or Acetyl
  MOD_RES (5)..(5): Tyr or Phospho-Tyr
  MOD_RES (9)..(9): Modified Cys
  See specification as filed for detailed description of substitutions and preferred embodiments
EEEEYIQPCG

SEQ ID NO: 5252 - protein, 10 aa, Artificial Sequence
  Description of Artificial Sequence: Synthetic peptide
  N-term H or Acetyl
  MOD_RES (5)..(5): Tyr or Phospho-Tyr
  MOD_RES (9)..(9): Modified Cys
  See specification as filed for detailed description of substitutions and preferred embodiments
EEEEYIQQCG

SEQ ID NO: 5253 - protein, 10 aa, Artificial Sequence
  Description of Artificial Sequence: Synthetic peptide
  N-term H or Acetyl
  MOD_RES (5)..(5): Tyr or Phospho-Tyr
  MOD_RES (9)..(9): Modified Cys
  See specification as filed for detailed description of substitutions and preferred embodiments
EEEEYIQRCG

SEQ ID NO: 5254 - protein, 10 aa, Artificial Sequence
  Description of Artificial Sequence: Synthetic peptide
  N-term H or Acetyl
  MOD_RES (5)..(5): Tyr or Phospho-Tyr
  MOD_RES (9)..(9): Modified Cys
  See specification as filed for detailed description of substitutions and preferred embodiments
EEEEYIQVCG

SEQ ID NO: 5255 - protein, 10 aa, Artificial Sequence
  Description of Artificial Sequence: Synthetic peptide
  N-term H or Acetyl
  MOD_RES (5)..(5): Tyr or Phospho-Tyr
  MOD_RES (9)..(9): Modified Cys
  See specification as filed for detailed description of substitutions and preferred embodiments
EEEEYIQWCG

SEQ ID NO: 5256 - protein, 10 aa, Artificial Sequence
  Description of Artificial Sequence: Synthetic peptide
  N-term H or Acetyl
  MOD_RES (5)..(5): Tyr or Phospho-Tyr
  MOD_RES (8)..(8): Pro or d-isoform of Pro
  MOD_RES (9)..(9): Modified Cys
  See specification as filed for detailed description of substitutions and preferred embodiments
EEEEYIRPCG

SEQ ID NO: 5257 - protein, 10 aa, Artificial Sequence
  Description of Artificial Sequence: Synthetic peptide
  N-term H or Acetyl
  MOD_RES (5)..(5): Tyr or Phospho-Tyr
  MOD_RES (8)..(8): Modified Cys
  See specification as filed for detailed description of substitutions and preferred embodiments
EEEEYIRCVG

SEQ ID NO: 5258 - protein, 10 aa, Artificial Sequence
  Description of Artificial Sequence: Synthetic peptide
  N-term H or Acetyl
  MOD_RES (5)..(5): Tyr or Phospho-Tyr
  MOD_RES (8)..(8): Pro or d-isoform of Pro
  MOD_RES (9)..(9): Modified Cys
  See specification as filed for detailed description of substitutions and preferred embodiments
EEEEYIVPCG

SEQ ID NO: 5259 - protein, 10 aa, Artificial Sequence
  Description of Artificial Sequence: Synthetic peptide
  N-term H or Acetyl
  MOD_RES (5)..(5): Tyr or Phospho-Tyr
  MOD_RES (8)..(8): Modified Cys
  See specification as filed for detailed description of substitutions and preferred embodiments
EEEEYIVCVG

SEQ ID NO: 5260 - protein, 10 aa, Artificial Sequence
  Description of Artificial Sequence: Synthetic peptide
  N-term H or Acetyl
  MOD_RES (5)..(5): Tyr or Phospho-Tyr
  MOD_RES (8)..(8): Pro or d-isoform of Pro
  MOD_RES (9)..(9): Modified Cys
  See specification as filed for detailed description of substitutions and preferred embodiments
EEEEYIWPCG

SEQ ID NO: 5261 - protein, 10 aa, Artificial Sequence
  Description of Artificial Sequence: Synthetic peptide
  N-term H or Acetyl
  MOD_RES (5)..(5): Tyr or Phospho-Tyr
  MOD_RES (8)..(8): Modified Cys
  See specification as filed for detailed description of substitutions and preferred embodiments
EEEEYIWCVG

SEQ ID NO: 5262 - protein, 9 aa, Artificial Sequence
  Description of Artificial Sequence: Synthetic peptide
  N-term H or Acetyl
  MOD_RES (5)..(5): Tyr or Phospho-Tyr
  MOD_RES (7)..(7): Modified Cys
  See specification as filed for detailed description of substitutions and preferred embodiments
EEEEYKCVG

SEQ ID NO: 5263 - protein, 10 aa, Artificial Sequence
  Description of Artificial Sequence: Synthetic peptide
  N-term H or Acetyl
  MOD_RES (5)..(5): Tyr or Phospho-Tyr
  MOD_RES (8)..(8): Pro or d-isoform of Pro
  MOD_RES (9)..(9): Modified Cys
  See specification as filed for detailed description of substitutions and preferred embodiments
EEEEYKQPCG

SEQ ID NO: 5264 - protein, 10 aa, Artificial Sequence
  Description of Artificial Sequence: Synthetic peptide
  N-term H or Acetyl
  MOD_RES (5)..(5): Tyr or Phospho-Tyr
  MOD_RES (8)..(8): Modified Cys
  See specification as filed for detailed description of substitutions and preferred embodiments
EEEEYKQCVG

SEQ ID NO: 5265 - protein, 9 aa, Artificial Sequence
  Description of Artificial Sequence: Synthetic peptide
  N-term H or Acetyl
  MOD_RES (5)..(5): Tyr or Phospho-Tyr
  MOD_RES (7)..(7): Modified Cys
  See specification as filed for detailed description of substitutions and preferred embodiments
EEEEYLCVG

SEQ ID NO: 5266 - protein, 10 aa, Artificial Sequence
  Description of Artificial Sequence: Synthetic peptide
  N-term H or Acetyl
  MOD_RES (5)..(5): Tyr or Phospho-Tyr
  MOD_RES (8)..(8): Pro or d-isoform of Pro
  MOD_RES (9)..(9): Modified Cys
  See specification as filed for detailed description of substitutions and preferred embodiments
EEEEYLQPCG

SEQ ID NO: 5267 - protein, 10 aa, Artificial Sequence
  Description of Artificial Sequence: Synthetic peptide
  N-term H or Acetyl
  MOD_RES (5)..(5): Tyr or Phospho-Tyr
  MOD_RES (8)..(8): Modified Cys
  See specification as filed for detailed description of substitutions and preferred embodiments
EEEEYLQCVG

SEQ ID NO: 5268 - protein, 9 aa, Artificial Sequence
  Description of Artificial Sequence: Synthetic peptide
  N-term H or Acetyl
  MOD_RES (5)..(5): Tyr or Phospho-Tyr
  MOD_RES (7)..(7): Modified Cys
  See specification as filed for detailed description of substitutions and preferred embodiments
EEEEYNCVG

SEQ ID NO: 5269 - protein, 10 aa, Artificial Sequence
  Description of Artificial Sequence: Synthetic peptide
  N-term H or Acetyl
  MOD_RES (5)..(5): Tyr or Phospho-Tyr
  MOD_RES (8)..(8): Pro or d-isoform of Pro
  MOD_RES (9)..(9): Modified Cys
  See specification as filed for detailed description of substitutions and preferred embodiments
EEEEYNQPCG

SEQ ID NO: 5270 - protein, 10 aa, Artificial Sequence
  Description of Artificial Sequence: Synthetic peptide
  N-term H or Acetyl
  MOD_RES (5)..(5): Tyr or Phospho-Tyr
  MOD_RES (8)..(8): Modified Cys
  See specification as filed for detailed description of substitutions and preferred embodiments
EEEEYNQCVG

SEQ ID NO: 5271 - protein, 9 aa, Artificial Sequence
  Description of Artificial Sequence: Synthetic peptide
  N-term H or Acetyl
  MOD_RES (5)..(5): Tyr or Phospho-Tyr
  MOD_RES (7)..(7): Modified Cys
  See specification as filed for detailed description of substitutions and preferred embodiments
EEEEYPCVG

SEQ ID NO: 5272 - protein, 10 aa, Artificial Sequence
  Description of Artificial Sequence: Synthetic peptide
  N-term H or Acetyl
  MOD_RES (5)..(5): Tyr or Phospho-Tyr
  MOD_RES (8)..(8): Pro or d-isoform of Pro
  MOD_RES (9)..(9): Modified Cys
  See specification as filed for detailed description of substitutions and preferred embodiments
EEEEYPQPCG

SEQ ID NO: 5273 - protein, 10 aa, Artificial Sequence
  Description of Artificial Sequence: Synthetic peptide
  N-term H or Acetyl
  MOD_RES (5)..(5): Tyr or Phospho-Tyr
  MOD_RES (8)..(8): Modified Cys
  See specification as filed for detailed description of substitutions and preferred embodiments
EEEEYPQCVG

SEQ ID NO: 5274 - protein, 9 aa, Artificial Sequence
  Description of Artificial Sequence: Synthetic peptide
  N-term H or Acetyl
  MOD_RES (5)..(5): Tyr or Phospho-Tyr
  MOD_RES (7)..(7): Modified Cys
  See specification as filed for detailed description of substitutions and preferred embodiments
EEEEYQCVG

SEQ ID NO: 5275 - protein, 10 aa, Artificial Sequence
  Description of Artificial Sequence: Synthetic peptide
  N-term H or Acetyl
  MOD_RES (5)..(5): Tyr or Phospho-Tyr
  MOD_RES (8)..(8): Pro or d-isoform of Pro
  MOD_RES (9)..(9): Modified Cys
  See specification as filed for detailed description of substitutions and preferred embodiments
EEEEYQQPCG

SEQ ID NO: 5276 - protein, 10 aa, Artificial Sequence
  Description of Artificial Sequence: Synthetic peptide
  N-term H or Acetyl
  MOD_RES (5)..(5): Tyr or Phospho-Tyr
  MOD_RES (8)..(8): Modified Cys
  See specification as filed for detailed description of substitutions and preferred embodiments
EEEEYQQCVG

SEQ ID NO: 5277 - protein, 9 aa, Artificial Sequence
  Description of Artificial Sequence: Synthetic peptide
  N-term H or Acetyl
  MOD_RES (5)..(5): Tyr or Phospho-Tyr
  MOD_RES (7)..(7): Modified Cys
  See specification as filed for detailed description of substitutions and preferred embodiments
EEEEYRCVG

SEQ ID NO: 5278 - protein, 10 aa, Artificial Sequence
  Description of Artificial Sequence: Synthetic peptide
  N-term H or Acetyl
  MOD_RES (5)..(5): Tyr or Phospho-Tyr
  MOD_RES (8)..(8): Pro or d-isoform of Pro
  MOD_RES (9)..(9): Modified Cys
  See specification as filed for detailed description of substitutions and preferred embodiments
EEEEYRQPCG

SEQ ID NO: 5279 - protein, 10 aa, Artificial Sequence
  Description of Artificial Sequence: Synthetic peptide
  N-term H or Acetyl
  MOD_RES (5)..(5): Tyr or Phospho-Tyr
  MOD_RES (8)..(8): Modified Cys
  See specification as filed for detailed description of substitutions and preferred embodiments
EEEEYRQCVG

SEQ ID NO: 5280 - protein, 9 aa, Artificial Sequence
  Description of Artificial Sequence: Synthetic peptide
  N-term H or Acetyl
  MOD_RES (5)..(5): Tyr or Phospho-Tyr
  MOD_RES (7)..(7): Modified Cys
  See specification as filed for detailed description of substitutions and preferred embodiments
EEEEYVCVG

SEQ ID NO: 5281 - protein, 10 aa, Artificial Sequence
  Description of Artificial Sequence: Synthetic peptide
  N-term H or Acetyl
  MOD_RES (5)..(5): Tyr or Phospho-Tyr
  MOD_RES (8)..(8): Pro or d-isoform of Pro
  MOD_RES (9)..(9): Modified Cys
  See specification as filed for detailed description of substitutions and preferred embodiments
EEEEYVQPCG

SEQ ID NO: 5282 - protein, 10 aa, Artificial Sequence
  Description of Artificial Sequence: Synthetic peptide
  N-term H or Acetyl
  MOD_RES (5)..(5): Tyr or Phospho-Tyr
  MOD_RES (8)..(8): Modified Cys
  See specification as filed for detailed description of substitutions and preferred embodiments
EEEEYVQCVG

SEQ ID NO: 5283 - protein, 9 aa, Artificial Sequence
  Description of Artificial Sequence: Synthetic peptide
  N-term H or Acetyl
  MOD_RES (5)..(5): Tyr or Phospho-Tyr
  MOD_RES (7)..(7): Modified Cys
  See specification as filed for detailed description of substitutions and preferred embodiments
EEEEYWCVG

SEQ ID NO: 5284 - protein, 10 aa, Artificial Sequence
  Description of Artificial Sequence: Synthetic peptide
  N-term H or Acetyl
  MOD_RES (5)..(5): Tyr or Phospho-Tyr
  MOD_RES (8)..(8): Pro or d-isoform of Pro
  MOD_RES (9)..(9): Modified Cys
  See specification as filed for detailed description of substitutions and preferred embodiments
EEEEYWQPCG

SEQ ID NO: 5285 - protein, 10 aa, Artificial Sequence
  Description of Artificial Sequence: Synthetic peptide
  N-term H or Acetyl
  MOD_RES (5)..(5): Tyr or Phospho-Tyr
  MOD_RES (8)..(8): Modified Cys
  See specification as filed for detailed description of substitutions and preferred embodiments
EEEEYWQCVG

SEQ ID NO: 5286 - protein, 10 aa, Artificial Sequence
  Description of Artificial Sequence: Synthetic peptide
  N-term H or Acetyl
  MOD_RES (5)..(5): Tyr or Phospho-Tyr
  MOD_RES (7)..(7): Modified Cys
  See specification as filed for detailed description of substitutions and preferred embodiments
EEEIYFCFWG

SEQ ID NO: 5287 - protein, 8 aa, Artificial Sequence
  Description of Artificial Sequence: Synthetic peptide
  N-term H or Acetyl
  MOD_RES (4)..(4): Tyr or Phospho-Tyr
  MOD_RES (6)..(6): Modified Cys
  MOD_RES (7)..(7): Leu or Nle (i.e. isomer of Leucine)
  See specification as filed for detailed description of substitutions and preferred embodiments
EEEYICLV

SEQ ID NO: 5288 - protein, 8 aa, Artificial Sequence
  Description of Artificial Sequence: Synthetic peptide
  N-term H or Acetyl
  MOD_RES (4)..(4): Tyr or Phospho-Tyr
  MOD_RES (6)..(6): Modified Cys
  See specification as filed for detailed description of substitutions and preferred embodiments
EEEYICAV

SEQ ID NO: 5289 - protein, 8 aa, Artificial Sequence
  Description of Artificial Sequence: Synthetic peptide
  N-term H or Acetyl
  MOD_RES (4)..(4): Tyr or Phospho-Tyr
  MOD_RES (6)..(6): Modified Cys
  See specification as filed for detailed description of substitutions and preferred embodiments
EEEYICDV

SEQ ID NO: 5290 - protein, 8 aa, Artificial Sequence
  Description of Artificial Sequence: Synthetic peptide
  N-term H or Acetyl
  MOD_RES (4)..(4): Tyr or Phospho-Tyr
  MOD_RES (6)..(6): Modified Cys
  See specification as filed for detailed description of substitutions and preferred embodiments
EEEYICFV

SEQ ID NO: 5291 - protein, 8 aa, Artificial Sequence
  Description of Artificial Sequence: Synthetic peptide
  N-term H or Acetyl
  MOD_RES (4)..(4): Tyr or Phospho-Tyr
  MOD_RES (6)..(6): Modified Cys
  See specification as filed for detailed description of substitutions and preferred embodiments
EEEYICGV

SEQ ID NO: 5292 - protein, 8 aa, Artificial Sequence
  Description of Artificial Sequence: Synthetic peptide
  N-term H or Acetyl
  MOD_RES (4)..(4): Tyr or Phospho-Tyr
  MOD_RES (6)..(6): Modified Cys
  See specification as filed for detailed description of substitutions and preferred embodiments
EEEYICHV

SEQ ID NO: 5293 - protein, 8 aa, Artificial Sequence
  Description of Artificial Sequence: Synthetic peptide
  N-term H or Acetyl
  MOD_RES (4)..(4): Tyr or Phospho-Tyr
  MOD_RES (6)..(6): Modified Cys
  MOD_RES (8)..(8): Leu or Nle (i.e. isomer of Leucine)
  See specification as filed for detailed description of substitutions and preferred embodiments
EEEYICIL

SEQ ID NO: 5294 - protein, 8 aa, Artificial Sequence
  Description of Artificial Sequence: Synthetic peptide
  N-term H or Acetyl
  MOD_RES (4)..(4): Tyr or Phospho-Tyr
  MOD_RES (6)..(6): Modified Cys
  See specification as filed for detailed description of substitutions and preferred embodiments
EEEYICIA

SEQ ID NO: 5295 - protein, 8 aa, Artificial Sequence
  Description of Artificial Sequence: Synthetic peptide
  N-term H or Acetyl
  MOD_RES (4)..(4): Tyr or Phospho-Tyr
  MOD_RES (6)..(6): Modified Cys
  See specification as filed for detailed description of substitutions and preferred embodiments
EEEYICID

SEQ ID NO: 5296 - protein, 8 aa, Artificial Sequence
  Description of Artificial Sequence: Synthetic peptide
  N-term H or Acetyl
  MOD_RES (4)..(4): Tyr or Phospho-Tyr
  MOD_RES (6)..(6): Modified Cys
  See specification as filed for detailed description of substitutions and preferred embodiments
EEEYICIE

SEQ ID NO: 5297 - protein, 8 aa, Artificial Sequence
  Description of Artificial Sequence: Synthetic peptide
  N-term H or Acetyl
  MOD_RES (4)..(4): Tyr or Phospho-Tyr
  MOD_RES (6)..(6): Modified Cys
  See specification as filed for detailed description of substitutions and preferred embodiments
EEEYICIF

SEQ ID NO: 5298 - protein, 8 aa, Artificial Sequence
  Description of Artificial Sequence: Synthetic peptide
  N-term H or Acetyl
  MOD_RES (4)..(4): Tyr or Phospho-Tyr
  MOD_RES (6)..(6): Modified Cys
  See specification as filed for detailed description of substitutions and preferred embodiments
EEEYICIG

SEQ ID NO: 5299 - protein, 8 aa, Artificial Sequence
  Description of Artificial Sequence: Synthetic peptide
  N-term H or Acetyl
  MOD_RES (4)..(4): Tyr or Phospho-Tyr
  MOD_RES (6)..(6): Modified Cys
  See specification as filed for detailed description of substitutions and preferred embodiments
EEEYICIH

SEQ ID NO: 5300 - protein, 8 aa, Artificial Sequence
  Description of Artificial Sequence: Synthetic peptide
  N-term H or Acetyl
  MOD_RES (4)..(4): Tyr or Phospho-Tyr
  MOD_RES (6)..(6): Modified Cys
  See specification as filed for detailed description of substitutions and preferred embodiments
EEEYICII

SEQ ID NO: 5301 - protein, 8 aa, Artificial Sequence
  Description of Artificial Sequence: Synthetic peptide
  N-term H or Acetyl
  MOD_RES (4)..(4): Tyr or Phospho-Tyr
  MOD_RES (6)..(6): Modified Cys
  See specification as filed for detailed description of substitutions and preferred embodiments
EEEYICIK

SEQ ID NO: 5302 - protein, 8 aa, Artificial Sequence
  Description of Artificial Sequence: Synthetic peptide
  N-term H or Acetyl
  MOD_RES (4)..(4): Tyr or Phospho-Tyr
  MOD_RES (6)..(6): Modified Cys
  See specification as filed for detailed description of substitutions and preferred embodiments
EEEYICIL

SEQ ID NO: 5303 - protein, 8 aa, Artificial Sequence
  Description of Artificial Sequence: Synthetic peptide
  N-term H or Acetyl
  MOD_RES (4)..(4): Tyr or Phospho-Tyr
  MOD_RES (6)..(6): Modified Cys
  See specification as filed for detailed description of substitutions and preferred embodiments
EEEYICIM

SEQ ID NO: 5304 - protein, 8 aa, Artificial Sequence
  Description of Artificial Sequence: Synthetic peptide
  N-term H or Acetyl
  MOD_RES (4)..(4): Tyr or Phospho-Tyr
  MOD_RES (6)..(6): Modified Cys
  See specification as filed for detailed description of substitutions and preferred embodiments
EEEYICIN

SEQ ID NO: 5305 - protein, 8 aa, Artificial Sequence
  Description of Artificial Sequence: Synthetic peptide
  N-term H or Acetyl
  MOD_RES (4)..(4): Tyr or Phospho-Tyr
  MOD_RES (6)..(6): Modified Cys
  See specification as filed for detailed description of substitutions and preferred embodiments
EEEYICIP

SEQ ID NO: 5306 - protein, 8 aa, Artificial Sequence
  Description of Artificial Sequence: Synthetic peptide
  N-term H or Acetyl
  MOD_RES (4)..(4): Tyr or Phospho-Tyr
  MOD_RES (6)..(6): Modified Cys
  See specification as filed for detailed description of substitutions and preferred embodiments
EEEYICIQ

SEQ ID NO: 5307 - protein, 8 aa, Artificial Sequence
  Description of Artificial Sequence: Synthetic peptide
  N-term H or Acetyl
  MOD_RES (4)..(4): Tyr or Phospho-Tyr
  MOD_RES (6)..(6): Modified Cys
  See specification as filed for detailed description of substitutions and preferred embodiments
EEEYICIR

SEQ ID NO: 5308 - protein, 8 aa, Artificial Sequence
  Description of Artificial Sequence: Synthetic peptide
  N-term H or Acetyl
  MOD_RES (4)..(4): Tyr or Phospho-Tyr
  MOD_RES (6)..(6): Modified Cys
  See specification as filed for detailed description of substitutions and preferred embodiments
EEEYICIW

SEQ ID NO: 5309 - protein, 8 aa, Artificial Sequence
  Description of Artificial Sequence: Synthetic peptide
  N-term H or Acetyl
  MOD_RES (4)..(4): Tyr or Phospho-Tyr
  MOD_RES (6)..(6): Modified Cys
  See specification as filed for detailed description of substitutions and preferred embodiments
EEEYICKV

SEQ ID NO: 5310 - protein, 8 aa, Artificial Sequence
  Description of Artificial Sequence: Synthetic peptide
  N-term H or Acetyl
  MOD_RES (4)..(4): Tyr or Phospho-Tyr
  MOD_RES (6)..(6): Modified Cys
  See specification as filed for detailed description of substitutions and preferred embodiments
EEEYICLV

SEQ ID NO: 5311 - protein, 8 aa, Artificial Sequence
  Description of Artificial Sequence: Synthetic peptide
  N-term H or Acetyl
  MOD_RES (4)..(4): Tyr or Phospho-Tyr
  MOD_RES (6)..(6): Modified Cys
  See specification as filed for detailed description of substitutions and preferred embodiments
EEEYICMV

SEQ ID NO: 5312 - protein, 8 aa, Artificial Sequence
  Description of Artificial Sequence: Synthetic peptide
  N-term H or Acetyl
  MOD_RES (4)..(4): Tyr or Phospho-Tyr
  MOD_RES (6)..(6): Modified Cys
  See specification as filed for detailed description of substitutions and preferred embodiments
EEEYICNV

SEQ ID NO: 5313 - protein, 8 aa, Artificial Sequence
  Description of Artificial Sequence: Synthetic peptide
  N-term H or Acetyl
  MOD_RES (4)..(4): Tyr or Phospho-Tyr
  MOD_RES (6)..(6): Modified Cys
  See specification as filed for detailed description of substitutions and preferred embodiments
EEEYICPV

SEQ ID NO: 5314 - protein, 8 aa, Artificial Sequence
  Description of Artificial Sequence: Synthetic peptide
  N-term H or Acetyl
  MOD_RES (4)..(4): Tyr or Phospho-Tyr
  MOD_RES (6)..(6): Modified Cys
  See specification as filed for detailed description of substitutions and preferred embodiments
EEEYICQV

SEQ ID NO: 5315 - protein, 8 aa, Artificial Sequence
  Description of Artificial Sequence: Synthetic peptide
  N-term H or Acetyl
  MOD_RES (4)..(4): Tyr or Phospho-Tyr
  MOD_RES (6)..(6): Modified Cys
  See specification as filed for detailed description of substitutions and preferred embodiments
EEEYICRV

SEQ ID NO: 5316 - protein, 8 aa, Artificial Sequence
  Description of Artificial Sequence: Synthetic peptide
  N-term H or Acetyl
  MOD_RES (4)..(4): Tyr or Phospho-Tyr
  MOD_RES (6)..(6): Modified Cys
  See specification as filed for detailed description of substitutions and preferred embodiments
EEEYICVV

SEQ ID NO: 5317 - protein, 8 aa, Artificial Sequence
  Description of Artificial Sequence: Synthetic peptide
  N-term H or Acetyl
  MOD_RES (4)..(4): Tyr or Phospho-Tyr
  MOD_RES (6)..(6): Modified Cys
  See specification as filed for detailed description of substitutions and preferred embodiments
EEEYICWV

SEQ ID NO: 5318 - protein, 9 aa, Artificial Sequence
  Description of Artificial Sequence: Synthetic peptide
  N-term H or Acetyl
  MOD_RES (5)..(5): Tyr or Phospho-Tyr
  MOD_RES (7)..(7): Modified Cys
  See specification as filed for detailed description of substitutions and preferred embodiments
EEPDYECQP

SEQ ID NO: 5319 - protein, 9 aa, Artificial Sequence
  Description of Artificial Sequence: Synthetic peptide
  N-term H or Acetyl
  MOD_RES (5)..(5): Tyr or Phospho-Tyr
  MOD_RES (7)..(7): Modified Cys
  See specification as filed for detailed description of substitutions and preferred embodiments
EEPDYFCFG

SEQ ID NO: 5320 - protein, 9 aa, Artificial Sequence
  Description of Artificial Sequence: Synthetic peptide
  N-term H or Acetyl
  MOD_RES (5)..(5): Tyr or Phospho-Tyr
  MOD_RES (7)..(7): Modified Cys
  See specification as filed for detailed description of substitutions and preferred embodiments
EEPDYFCFK

SEQ ID NO: 5321 - protein, 9 aa, Artificial Sequence
  Description of Artificial Sequence: Synthetic peptide
  N-term H or Acetyl
  MOD_RES (5)..(5): Tyr or Phospho-Tyr
  MOD_RES (7)..(7): Modified Cys
  See specification as filed for detailed description of substitutions and preferred embodiments
EEPDYFCFP

SEQ ID NO: 5322 - protein, 9 aa, Artificial Sequence
  Description of Artificial Sequence: Synthetic peptide
  N-term H or Acetyl
  MOD_RES (5)..(5): Tyr or Phospho-Tyr
  MOD_RES (7)..(7): Modified Cys
  See specification as filed for detailed description of substitutions and preferred embodiments
EEPDYFCIG

SEQ ID NO: 5323 - protein, 9 aa, Artificial Sequence
  Description of Artificial Sequence: Synthetic peptide
  N-term H or Acetyl
  MOD_RES (5)..(5): Tyr or Phospho-Tyr
  MOD_RES (7)..(7): Modified Cys
  See specification as filed for detailed description of substitutions and preferred embodiments
EEPDYFCIK

SEQ ID NO: 5324 - protein, 9 aa, Artificial Sequence
  Description of Artificial Sequence: Synthetic peptide
  N-term H or Acetyl
  MOD_RES (5)..(5): Tyr or Phospho-Tyr
  MOD_RES (7)..(7): Modified Cys
  See specification as filed for detailed description of substitutions and preferred embodiments
EEPDYFCIP

SEQ ID NO: 5325 - protein, 9 aa, Artificial Sequence
  Description of Artificial Sequence: Synthetic peptide
  N-term H or Acetyl
  MOD_RES (5)..(5): Tyr or Phospho-Tyr
  MOD_RES (7)..(7): Modified Cys
  See specification as filed for detailed description of substitutions and preferred embodiments
EEPDYFCMG

SEQ ID NO: 5326 - protein, 9 aa, Artificial Sequence
  Description of Artificial Sequence: Synthetic peptide
  N-term H or Acetyl
  MOD_RES (5)..(5): Tyr or Phospho-Tyr
  MOD_RES (7)..(7): Modified Cys
  See specification as filed for detailed description of substitutions and preferred embodiments
EEPDYFCMK

SEQ ID NO: 5327 - protein, 9 aa, Artificial Sequence
  Description of Artificial Sequence: Synthetic peptide
  N-term H or Acetyl
  MOD_RES (5)..(5): Tyr or Phospho-Tyr
  MOD_RES (7)..(7): Modified Cys
  See specification as filed for detailed description of substitutions and preferred embodiments
EEPDYFCMP

SEQ ID NO: 5328 - protein, 9 aa, Artificial Sequence
  Description of Artificial Sequence: Synthetic peptide
  N-term H or Acetyl
  MOD_RES (5)..(5): Tyr or Phospho-Tyr
  MOD_RES (7)..(7): Modified Cys
  See specification as filed for detailed description of substitutions and preferred embodiments
EEPDYFCVG

SEQ ID NO: 5329 - protein, 9 aa, Artificial Sequence
  Description of Artificial Sequence: Synthetic peptide
  N-term H or Acetyl
  MOD_RES (5)..(5): Tyr or Phospho-Tyr
  MOD_RES (7)..(7): Modified Cys
  See specification as filed for detailed description of substitutions and preferred embodiments
EEPDYFCVK

SEQ ID NO: 5330 - protein, 9 aa, Artificial Sequence
  Description of Artificial Sequence: Synthetic peptide
  N-term H or Acetyl
  MOD_RES (5)..(5): Tyr or Phospho-Tyr
  MOD_RES (7)..(7): Modified Cys
  See specification as filed for detailed description of substitutions and preferred embodiments
EEPDYFCVP

SEQ ID NO: 5331 - protein, 9 aa, Artificial Sequence
  Description of Artificial Sequence: Synthetic peptide
  N-term H or Acetyl
  MOD_RES (5)..(5): Tyr or Phospho-Tyr
  MOD_RES (7)..(7): Modified Cys
  See specification as filed for detailed description of substitutions and preferred embodiments
EEPDYICFG

SEQ ID NO: 5332 - protein, 9 aa, Artificial Sequence
  Description of Artificial Sequence: Synthetic peptide
  N-term H or Acetyl
  MOD_RES (5)..(5): Tyr or Phospho-Tyr
  MOD_RES (7)..(7): Modified Cys
  See specification as filed for detailed description of substitutions and preferred embodiments
EEPDYICFK

SEQ ID NO: 5333 - protein, 9 aa, Artificial Sequence
  Description of Artificial Sequence: Synthetic peptide
  N-term H or Acetyl
  MOD_RES (5)..(5): Tyr or Phospho-Tyr
  MOD_RES (7)..(7): Modified Cys
  See specification as filed for detailed description of substitutions and preferred embodiments
EEPDYICFP

SEQ ID NO: 5334 - protein, 9 aa, Artificial Sequence
  Description of Artificial Sequence: Synthetic peptide
  N-term H or Acetyl
  MOD_RES (5)..(5): Tyr or Phospho-Tyr
  MOD_RES (7)..(7): Modified Cys
  See specification as filed for detailed description of substitutions and preferred embodiments
EEPDYICIG

SEQ ID NO: 5335 - protein, 9 aa, Artificial Sequence
  Description of Artificial Sequence: Synthetic peptide
  N-term H or Acetyl
  MOD_RES (5)..(5): Tyr or Phospho-Tyr
  MOD_RES (7)..(7): Modified Cys
  See specification as filed for detailed description of substitutions and preferred embodiments
EEPDYICIK

SEQ ID NO: 5336 - protein, 9 aa, Artificial Sequence
  Description of Artificial Sequence: Synthetic peptide
  N-term H or Acetyl
  MOD_RES (5)..(5): Tyr or Phospho-Tyr
  MOD_RES (7)..(7): Modified Cys
  See specification as filed for detailed description of substitutions and preferred embodiments
EEPDYICIP

SEQ ID NO: 5337 - protein, 9 aa, Artificial Sequence
  Description of Artificial Sequence: Synthetic peptide
  N-term H or Acetyl
  MOD_RES (5)..(5): Tyr or Phospho-Tyr
  MOD_RES (7)..(7): Modified Cys
  See specification as filed for detailed description of substitutions and preferred embodiments
EEPDYICMG

SEQ ID NO: 5338 - protein, 9 aa, Artificial Sequence
  Description of Artificial Sequence: Synthetic peptide
  N-term H or Acetyl
  MOD_RES (5)..(5): Tyr or Phospho-Tyr
  MOD_RES (7)..(7): Modified Cys
  See specification as filed for detailed description of substitutions and preferred embodiments
EEPDYICMK

SEQ ID NO: 5339 - protein, 9 aa, Artificial Sequence
  Description of Artificial Sequence: Synthetic peptide
  N-term H or Acetyl
  MOD_RES (5)..(5): Tyr or Phospho-Tyr
  MOD_RES (7)..(7): Modified Cys
  See specification as filed for detailed description of substitutions and preferred embodiments
EEPDYICMP

SEQ ID NO: 5340 - protein, 9 aa, Artificial Sequence
  Description of Artificial Sequence: Synthetic peptide
  N-term H or Acetyl
  MOD_RES (5)..(5): Tyr or Phospho-Tyr
  MOD_RES (7)..(7): Modified Cys
  See specification as filed for detailed description of substitutions and preferred embodiments
EEPDYICVG

SEQ ID NO: 5341 - protein, 9 aa, Artificial Sequence
  Description of Artificial Sequence: Synthetic peptide
  N-term H or Acetyl
  MOD_RES (5)..(5): Tyr or Phospho-Tyr
  MOD_RES (7)..(7): Modified Cys
  See specification as filed for detailed description of substitutions and preferred embodiments
EEPDYICVK

SEQ ID NO: 5342 - protein, 9 aa, Artificial Sequence
  Description of Artificial Sequence: Synthetic peptide
  N-term H or Acetyl
  MOD_RES (5)..(5): Tyr or Phospho-Tyr
  MOD_RES (7)..(7): Modified Cys
  See specification as filed for detailed description of substitutions and preferred embodiments
EEPDYVCFG

SEQ ID NO: 5343 - protein, 9 aa, Artificial Sequence
  Description of Artificial Sequence: Synthetic peptide
  N-term H or Acetyl
  MOD_RES (5)..(5): Tyr or Phospho-Tyr
  MOD_RES (7)..(7): Modified Cys
  See specification as filed for detailed description of substitutions and preferred embodiments
EEPDYVCFK

SEQ ID NO: 5344 - protein, 9 aa, Artificial Sequence
  Description of Artificial Sequence: Synthetic peptide
  N-term H or Acetyl
  MOD_RES (5)..(5): Tyr or Phospho-Tyr
  MOD_RES (7)..(7): Modified Cys
  See specification as filed for detailed description of substitutions and preferred embodiments
EEPDYVCFP

SEQ ID NO: 5345 - protein, 9 aa, Artificial Sequence
  Description of Artificial Sequence: Synthetic peptide
  N-term H or Acetyl
  MOD_RES (5)..(5): Tyr or Phospho-Tyr
  MOD_RES (7)..(7): Modified Cys
  See specification as filed for detailed description of substitutions and preferred embodiments
EEPDYVCIG

SEQ ID NO: 5346 - protein, 9 aa, Artificial Sequence
  Description of Artificial Sequence: Synthetic peptide
  N-term H or Acetyl
  MOD_RES (5)..(5): Tyr or Phospho-Tyr
  MOD_RES (7)..(7): Modified Cys
  See specification as filed for detailed description of substitutions and preferred embodiments
EEPDYVCIK

SEQ ID NO: 5347 - protein, 9 aa, Artificial Sequence
  Description of Artificial Sequence: Synthetic peptide
  N-term H or Acetyl
  MOD_RES (5)..(5): Tyr or Phospho-Tyr
  MOD_RES (7)..(7): Modified Cys
  See specification as filed for detailed description of substitutions and preferred embodiments
EEPDYVCIP

SEQ ID NO: 5348 - protein, 9 aa, Artificial Sequence
  Description of Artificial Sequence: Synthetic peptide
  N-term H or Acetyl
  MOD_RES (5)..(5): Tyr or Phospho-Tyr
  MOD_RES (7)..(7): Modified Cys
  See specification as filed for detailed description of substitutions and preferred embodiments
EEPDYVCMG

SEQ ID NO: 5349 - protein, 9 aa, Artificial Sequence
  Description of Artificial Sequence: Synthetic peptide
  N-term H or Acetyl
  MOD_RES (5)..(5): Tyr or Phospho-Tyr
  MOD_RES (7)..(7): Modified Cys
  See specification as filed for detailed description of substitutions and preferred embodiments
EEPDYVCMK

SEQ ID NO: 5350 - protein, 9 aa, Artificial Sequence
  Description of Artificial Sequence: Synthetic peptide
  N-term H or Acetyl
  MOD_RES (5)..(5): Tyr or Phospho-Tyr
  MOD_RES (7)..(7): Modified Cys
  See specification as filed for detailed description of substitutions and preferred embodiments
EEPDYVCMP

SEQ ID NO: 5351 - protein, 9 aa, Artificial Sequence
  Description of Artificial Sequence: Synthetic peptide
  N-term H or Acetyl
  MOD_RES (5)..(5): Tyr or Phospho-Tyr
  MOD_RES (7)..(7): Modified Cys
  See specification as filed for detailed description of substitutions and preferred embodiments
EEPDYVCVG

SEQ ID NO: 5352 - protein, 9 aa, Artificial Sequence
  Description of Artificial Sequence: Synthetic peptide
  N-term H or Acetyl
  MOD_RES (5)..(5): Tyr or Phospho-Tyr
  MOD_RES (7)..(7): Modified Cys
  See specification as filed for detailed description of substitutions and preferred embodiments
EEPDYVCVK

SEQ ID NO: 5353 - protein, 9 aa, Artificial Sequence
  Description of Artificial Sequence: Synthetic peptide
  N-term H or Acetyl
  MOD_RES (5)..(5): Tyr or Phospho-Tyr
  MOD_RES (7)..(7): Modified Cys
  See specification as filed for detailed description of substitutions and preferred embodiments
EEPDYVCVP

SEQ ID NO: 5354 - protein, 9 aa, Artificial Sequence
  Description of Artificial Sequence: Synthetic peptide
  N-term H or Acetyl
  MOD_RES (5)..(5): Tyr or Phospho-Tyr
  MOD_RES (7)..(7): Modified Cys
  See specification as filed for detailed description of substitutions and preferred embodiments
EEPEYFCFG

SEQ ID NO: 5355 - protein, 9 aa, Artificial Sequence
  Description of Artificial Sequence: Synthetic peptide
  N-term H or Acetyl
  MOD_RES (5)..(5): Tyr or Phospho-Tyr
  MOD_RES (7)..(7): Modified Cys
  See specification as filed for detailed description of substitutions and preferred embodiments
EEPEYFCFK

SEQ ID NO: 5356 - protein, 9 aa, Artificial Sequence
  Description of Artificial Sequence: Synthetic peptide
  N-term H or Acetyl
  MOD_RES (5)..(5): Tyr or Phospho-Tyr
  MOD_RES (7)..(7): Modified Cys
  See specification as filed for detailed description of substitutions and preferred embodiments
EEPEYFCFP

SEQ ID NO: 5357 - protein, 9 aa, Artificial Sequence
  Description of Artificial Sequence: Synthetic peptide
  N-term H or Acetyl
  MOD_RES (5)..(5): Tyr or Phospho-Tyr
  MOD_RES (7)..(7): Modified Cys
  See specification as filed for detailed description of substitutions and preferred embodiments
EEPEYFCIG

SEQ ID NO: 5358 - protein, 9 aa, Artificial Sequence
  Description of Artificial Sequence: Synthetic peptide
  N-term H or Acetyl
  MOD_RES (5)..(5): Tyr or Phospho-Tyr
  MOD_RES (7)..(7): Modified Cys
  See specification as filed for detailed description of substitutions and preferred embodiments
EEPEYFCIK

SEQ ID NO: 5359 - protein, 9 aa, Artificial Sequence
  Description of Artificial Sequence: Synthetic peptide
  N-term H or Acetyl
  MOD_RES (5)..(5): Tyr or Phospho-Tyr
  MOD_RES (7)..(7): Modified Cys
  See specification as filed for detailed description of substitutions and preferred embodiments
EEPEYFCIP

SEQ ID NO: 5360 - protein, 9 aa, Artificial Sequence
  Description of Artificial Sequence: Synthetic peptide
  N-term H or Acetyl
  MOD_RES (5)..(5): Tyr or Phospho-Tyr
  MOD_RES (7)..(7): Modified Cys
  See specification as filed for detailed description of substitutions and preferred embodiments
EEPEYFCMG

SEQ ID NO: 5361 - protein, 9 aa, Artificial Sequence
  Description of Artificial Sequence: Synthetic peptide
  N-term H or Acetyl
  MOD_RES (5)..(5): Tyr or Phospho-Tyr
  MOD_RES (7)..(7): Modified Cys
  See specification as filed for detailed description of substitutions and preferred embodiments
EEPEYFCMK

SEQ ID NO: 5362 - protein, 9 aa, Artificial Sequence
  Description of Artificial Sequence: Synthetic peptide
  N-term H or Acetyl
  MOD_RES (5)..(5): Tyr or Phospho-Tyr
  MOD_RES (7)..(7): Modified Cys
  See specification as filed for detailed description of substitutions and preferred embodiments
EEPEYFCMP

SEQ ID NO: 5363 - protein, 9 aa, Artificial Sequence
  Description of Artificial Sequence: Synthetic peptide
  N-term H or Acetyl
  MOD_RES (5)..(5): Tyr or Phospho-Tyr
  MOD_RES (7)..(7): Modified Cys
  See specification as filed for detailed description of substitutions and preferred embodiments
EEPEYFCVG

SEQ ID NO: 5364 - protein, 9 aa, Artificial Sequence
  Description of Artificial Sequence: Synthetic peptide
  N-term H or Acetyl
  MOD_RES (5)..(5): Tyr or Phospho-Tyr
  MOD_RES (7)..(7): Modified Cys
  See specification as filed for detailed description of substitutions and preferred embodiments
EEPEYFCVK

SEQ ID NO: 5365 - protein, 9 aa, Artificial Sequence
  Description of Artificial Sequence: Synthetic peptide
  N-term H or Acetyl
  MOD_RES (5)..(5): Tyr or Phospho-Tyr
  MOD_RES (7)..(7): Modified Cys
  See specification as filed for detailed description of substitutions and preferred embodiments
EEPEYFCVP

SEQ ID NO: 5366 - protein, 9 aa, Artificial Sequence
  Description of Artificial Sequence: Synthetic peptide
  N-term H or Acetyl
  MOD_RES (5)..(5): Tyr or Phospho-Tyr
  MOD_RES (7)..(7): Modified Cys
  See specification as filed for detailed description of substitutions and preferred embodiments
EEPEYICFG

SEQ ID NO: 5367 - protein, 9 aa, Artificial Sequence
  Description of Artificial Sequence: Synthetic peptide
  N-term H or Acetyl
  MOD_RES (5)..(5): Tyr or Phospho-Tyr
  MOD_RES (7)..(7): Modified Cys
  See specification as filed for detailed description of substitutions and preferred embodiments
EEPEYICFK

SEQ ID NO: 5368 - protein, 9 aa, Artificial Sequence
  Description of Artificial Sequence: Synthetic peptide
  N-term H or Acetyl
  MOD_RES (5)..(5): Tyr or Phospho-Tyr
  MOD_RES (7)..(7): Modified Cys
  See specification as filed for detailed description of substitutions and preferred embodiments
EEPEYICFP

SEQ ID NO: 5369 - protein, 9 aa, Artificial Sequence
  Description of Artificial Sequence: Synthetic peptide
  N-term H or Acetyl
  MOD_RES (5)..(5): Tyr or Phospho-Tyr
  MOD_RES (7)..(7): Modified Cys
  See specification as filed for detailed description of substitutions and preferred embodiments
EEPEYICIG

SEQ ID NO: 5370 - protein, 9 aa, Artificial Sequence
  Description of Artificial Sequence: Synthetic peptide
  N-term H or Acetyl
  MOD_RES (5)..(5): Tyr or Phospho-Tyr
  MOD_RES (7)..(7): Modified Cys
  See specification as filed for detailed description of substitutions and preferred embodiments
EEPEYICIK

SEQ ID NO: 5371 - protein, 9 aa, Artificial Sequence
  Description of Artificial Sequence: Synthetic peptide
  N-term H or Acetyl
  MOD_RES (5)..(5): Tyr or Phospho-Tyr
  MOD_RES (7)..(7): Modified Cys
  See specification as filed for detailed description of substitutions and preferred embodiments
EEPEYICIP

SEQ ID NO: 5372 - protein, 9 aa, Artificial Sequence
  Description of Artificial Sequence: Synthetic peptide
  N-term H or Acetyl
  MOD_RES (5)..(5): Tyr or Phospho-Tyr
  MOD_RES (7)..(7): Modified Cys
  See specification as filed for detailed description of substitutions and preferred embodiments
EEPEYICMG

SEQ ID NO: 5373 - protein, 9 aa, Artificial Sequence
  Description of Artificial Sequence: Synthetic peptide
  N-term H or Acetyl
  MOD_RES (5)..(5): Tyr or Phospho-Tyr
  MOD_RES (7)..(7): Modified Cys
  See specification as filed for detailed description of substitutions and preferred embodiments
EEPEYICMK

SEQ ID NO: 5374 - protein, 9 aa, Artificial Sequence
  Description of Artificial Sequence: Synthetic peptide
  N-term H or Acetyl
  MOD_RES (5)..(5): Tyr or Phospho-Tyr
  MOD_RES (7)..(7): Modified Cys
  See specification as filed for detailed description of substitutions and preferred embodiments
EEPEYICMP

SEQ ID NO: 5375 - protein, 9 aa, Artificial Sequence
  Description of Artificial Sequence: Synthetic peptide
  N-term H or Acetyl
  MOD_RES (5)..(5): Tyr or Phospho-Tyr
  MOD_RES (7)..(7): Modified Cys
  See specification as filed for detailed description of substitutions and preferred embodiments
EEPEYICVG

SEQ ID NO: 5376 - protein, 9 aa, Artificial Sequence
  Description of Artificial Sequence: Synthetic peptide
  N-term H or Acetyl
  MOD_RES (5)..(5): Tyr or Phospho-Tyr
  MOD_RES (7)..(7): Modified Cys
  See specification as filed for detailed description of substitutions and preferred embodiments
EEPEYICVK

SEQ ID NO: 5377 - protein, 9 aa, Artificial Sequence
  Description of Artificial Sequence: Synthetic peptide
  N-term H or Acetyl
  MOD_RES (5)..(5): Tyr or Phospho-Tyr
  MOD_RES (7)..(7): Modified Cys
  See specification as filed for detailed description of substitutions and preferred embodiments
EEPEYVCFG

SEQ ID NO: 5378 - protein, 9 aa, Artificial Sequence
  Description of Artificial Sequence: Synthetic peptide
  N-term H or Acetyl
  MOD_RES (5)..(5): Tyr or Phospho-Tyr
  MOD_RES (7)..(7): Modified Cys
  See specification as filed for detailed description of substitutions and preferred embodiments
EEPEYVCFK

SEQ ID NO: 5379 - protein, 9 aa, Artificial Sequence
  Description of Artificial Sequence: Synthetic peptide
  N-term H or Acetyl
  MOD_RES (5)..(5): Tyr or Phospho-Tyr
  MOD_RES (7)..(7): Modified Cys
  See specification as filed for detailed description of substitutions and preferred embodiments
EEPEYVCFP

SEQ ID NO: 5380 - protein, 9 aa, Artificial Sequence
  Description of Artificial Sequence: Synthetic peptide
  N-term H or Acetyl
  MOD_RES (5)..(5): Tyr or Phospho-Tyr
  MOD_RES (7)..(7): Modified Cys
  See specification as filed for detailed description of substitutions and preferred embodiments
EEPEYVCIG

SEQ ID NO: 5381 - protein, 9 aa, Artificial Sequence
  Description of Artificial Sequence: Synthetic peptide
  N-term H or Acetyl
  MOD_RES (5)..(5): Tyr or Phospho-Tyr
  MOD_RES (7)..(7): Modified Cys
  See specification as filed for detailed description of substitutions and preferred embodiments
EEPEYVCIK

SEQ ID NO: 5382 - protein, 9 aa, Artificial Sequence
  Description of Artificial Sequence: Synthetic peptide
  N-term H or Acetyl
  MOD_RES (5)..(5): Tyr or Phospho-Tyr
  MOD_RES (7)..(7): Modified Cys
  See specification as filed for detailed description of substitutions and preferred embodiments
EEPEYVCIP

SEQ ID NO: 5383 - protein, 9 aa, Artificial Sequence
  Description of Artificial Sequence: Synthetic peptide
  N-term H or Acetyl
  MOD_RES (5)..(5): Tyr or Phospho-Tyr
  MOD_RES (7)..(7): Modified Cys
  See specification as filed for detailed description of substitutions and preferred embodiments
EEPEYVCMG

SEQ ID NO: 5384 - protein, 9 aa, Artificial Sequence
  Description of Artificial Sequence: Synthetic peptide
  N-term H or Acetyl
  MOD_RES (5)..(5): Tyr or Phospho-Tyr
  MOD_RES (7)..(7): Modified Cys
  See specification as filed for detailed description of substitutions and preferred embodiments
EEPEYVCMK

SEQ ID NO: 5385 - protein, 9 aa, Artificial Sequence
  Description of Artificial Sequence: Synthetic peptide
  N-term H or Acetyl
  MOD_RES (5)..(5): Tyr or Phospho-Tyr
  MOD_RES (7)..(7): Modified Cys
  See specification as filed for detailed description of substitutions and preferred embodiments
EEPEYVCMP

SEQ ID NO: 5386 - protein, 9 aa, Artificial Sequence
  Description of Artificial Sequence: Synthetic peptide
  N-term H or Acetyl
  MOD_RES (5)..(5): Tyr or Phospho-Tyr
  MOD_RES (7)..(7): Modified Cys
  See specification as filed for detailed description of substitutions and preferred embodiments
EEPEYVCVG

SEQ ID NO: 5387 - protein, 9 aa, Artificial Sequence
  Description of Artificial Sequence: Synthetic peptide
  N-term H or Acetyl
  MOD_RES (5)..(5): Tyr or Phospho-Tyr
  MOD_RES (7)..(7): Modified Cys
  See specification as filed for detailed description of substitutions and preferred embodiments
EEPEYVCVK

SEQ ID NO: 5388 - protein, 9 aa, Artificial Sequence
  Description of Artificial Sequence: Synthetic peptide
  N-term H or Acetyl
  MOD_RES (5)..(5): Tyr or Phospho-Tyr
  MOD_RES (7)..(7): Modified Cys
  See specification as filed for detailed description of substitutions and preferred embodiments
EEPEYVCVP

SEQ ID NO: 5389 - protein, 9 aa, Artificial Sequence
  Description of Artificial Sequence: Synthetic peptide
  N-term H or Acetyl
  MOD_RES (5)..(5): Tyr or Phospho-Tyr
  MOD_RES (7)..(7): Modified Cys
  See specification as filed for detailed description of substitutions and preferred embodiments
EEPIYFCFG

SEQ ID NO: 5390 - protein, 9 aa, Artificial Sequence
  Description of Artificial Sequence: Synthetic peptide
  N-term H or Acetyl
  MOD_RES (5)..(5): Tyr or Phospho-Tyr
  MOD_RES (7)..(7): Modified Cys
  See specification as filed for detailed description of substitutions and preferred embodiments
EEPIYFCFK

SEQ ID NO: 5391 - protein, 9 aa, Artificial Sequence
  Description of Artificial Sequence: Synthetic peptide
  N-term H or Acetyl
  MOD_RES (5)..(5): Tyr or Phospho-Tyr
  MOD_RES (7)..(7): Modified Cys
  See specification as filed for detailed description of substitutions and preferred embodiments
EEPIYFCFP

SEQ ID NO: 5392 - protein, 9 aa, Artificial Sequence
  Description of Artificial Sequence: Synthetic peptide
  N-term H or Acetyl
  MOD_RES (5)..(5): Tyr or Phospho-Tyr
  MOD_RES (7)..(7): Modified Cys
  See specification as filed for detailed description of substitutions and preferred embodiments
EEPIYFCIG

SEQ ID NO: 5393 - protein, 9 aa, Artificial Sequence
  Description of Artificial Sequence: Synthetic peptide
  N-term H or Acetyl
  MOD_RES (5)..(5): Tyr or Phospho-Tyr
  MOD_RES (7)..(7): Modified Cys
  See specification as filed for detailed description of substitutions and preferred embodiments
EEPIYFCIK

SEQ ID NO: 5394 - protein, 9 aa, Artificial Sequence
  Description of Artificial Sequence: Synthetic peptide
  N-term H or Acetyl
  MOD_RES (5)..(5): Tyr or Phospho-Tyr
  MOD_RES (7)..(7): Modified Cys
  See specification as filed for detailed description of substitutions and preferred embodiments
EEPIYFCIP

SEQ ID NO: 5395 - protein, 9 aa, Artificial Sequence
  Description of Artificial Sequence: Synthetic peptide
  N-term H or Acetyl
  MOD_RES (5)..(5): Tyr or Phospho-Tyr
  MOD_RES (7)..(7): Modified Cys
  See specification as filed for detailed description of substitutions and preferred embodiments
EEPIYFCMG

SEQ ID NO: 5396 - protein, 9 aa, Artificial Sequence
  Description of Artificial Sequence: Synthetic peptide
  N-term H or Acetyl
  MOD_RES (5)..(5): Tyr or Phospho-Tyr
  MOD_RES (7)..(7): Modified Cys
  See specification as filed for detailed description of substitutions and preferred embodiments
EEPIYFCMK

SEQ ID NO: 5397 - protein, 9 aa, Artificial Sequence
  Description of Artificial Sequence: Synthetic peptide
  N-term H or Acetyl
  MOD_RES (5)..(5): Tyr or Phospho-Tyr
  MOD_RES (7)..(7): Modified Cys
  See specification as filed for detailed description of substitutions and preferred embodiments
EEPIYFCMP

SEQ ID NO: 5398 - protein, 9 aa, Artificial Sequence
  Description of Artificial Sequence: Synthetic peptide
  N-term H or Acetyl
  MOD_RES (5)..(5): Tyr or Phospho-Tyr
  MOD_RES (7)..(7): Modified Cys
  See specification as filed for detailed description of substitutions and preferred embodiments
EEPIYFCVG

SEQ ID NO: 5399 - protein, 9 aa, Artificial Sequence
  Description of Artificial Sequence: Synthetic peptide
  N-term H or Acetyl
  MOD_RES (5)..(5): Tyr or Phospho-Tyr
  MOD_RES (7)..(7): Modified Cys
  See specification as filed for detailed description of substitutions and preferred embodiments
EEPIYFCVK

SEQ ID NO: 5400 - protein, 9 aa, Artificial Sequence
  Description of Artificial Sequence: Synthetic peptide
  N-term H or Acetyl
  MOD_RES (5)..(5): Tyr or Phospho-Tyr
  MOD_RES (7)..(7): Modified Cys
  See specification as filed for detailed description of substitutions and preferred embodiments
EEPIYICFG

SEQ ID NO: 5401 - protein, 9 aa, Artificial Sequence
  Description of Artificial Sequence: Synthetic peptide
  N-term H or Acetyl
  MOD_RES (5)..(5): Tyr or Phospho-Tyr
  MOD_RES (7)..(7): Modified Cys
  See specification as filed for detailed description of substitutions and preferred embodiments
EEPIYICFK

SEQ ID NO: 5402 - protein, 9 aa, Artificial Sequence
  Description of Artificial Sequence: Synthetic peptide
  N-term H or Acetyl
  MOD_RES (5)..(5): Tyr or Phospho-Tyr
  MOD_RES (7)..(7): Modified Cys
  See specification as filed for detailed description of substitutions and preferred embodiments
EEPIYICIG

SEQ ID NO: 5403 - protein, 9 aa, Artificial Sequence
  Description of Artificial Sequence: Synthetic peptide
  N-term H or Acetyl
  MOD_RES (5)..(5): Tyr or Phospho-Tyr
  MOD_RES (7)..(7): Modified Cys
  See specification as filed for detailed description of substitutions and preferred embodiments
EEPIYICIK

SEQ ID NO: 5404 - protein, 9 aa, Artificial Sequence
  Description of Artificial Sequence: Synthetic peptide
  N-term H or Acetyl
  MOD_RES (5)..(5): Tyr or Phospho-Tyr
  MOD_RES (7)..(7): Modified Cys
  See specification as filed for detailed description of substitutions and preferred embodiments
EEPIYICMG

SEQ ID NO: 5405 - protein, 9 aa, Artificial Sequence
  Description of Artificial Sequence: Synthetic peptide
  N-term H or Acetyl
  MOD_RES (5)..(5): Tyr or Phospho-Tyr
  MOD_RES (7)..(7): Modified Cys
  See specification as filed for detailed description of substitutions and preferred embodiments
EEPIYICMK

SEQ ID NO: 5406 - protein, 9 aa, Artificial Sequence
  Description of Artificial Sequence: Synthetic peptide
  N-term H or Acetyl
  MOD_RES (5)..(5): Tyr or Phospho-Tyr
  MOD_RES (7)..(7): Modified Cys
  See specification as filed for detailed description of substitutions and preferred embodiments
EEPIYVCFG

SEQ ID NO: 5407 - protein, 9 aa, Artificial Sequence
  Description of Artificial Sequence: Synthetic peptide
  N-term H or Acetyl
  MOD_RES (5)..(5): Tyr or Phospho-Tyr
  MOD_RES (7)..(7): Modified Cys
  See specification as filed for detailed description of substitutions and preferred embodiments
EEPIYVCFK

SEQ ID NO: 5408 - protein, 9 aa, Artificial Sequence
  Description of Artificial Sequence: Synthetic peptide
  N-term H or Acetyl
  MOD_RES (5)..(5): Tyr or Phospho-Tyr
  MOD_RES (7)..(7): Modified Cys
  See specification as filed for detailed description of substitutions and preferred embodiments
EEPIYVCFP

SEQ ID NO: 5409 - protein, 9 aa, Artificial Sequence
  Description of Artificial Sequence: Synthetic peptide
  N-term H or Acetyl
  MOD_RES (5)..(5): Tyr or Phospho-Tyr
  MOD_RES (7)..(7): Modified Cys
  See specification as filed for detailed description of substitutions and preferred embodiments
EEPIYVCIG

SEQ ID NO: 5410 - protein, 9 aa, Artificial Sequence
  Description of Artificial Sequence: Synthetic peptide
  N-term H or Acetyl
  MOD_RES (5)..(5): Tyr or Phospho-Tyr
  MOD_RES (7)..(7): Modified Cys
  See specification as filed for detailed description of substitutions and preferred embodiments
EEPIYVCIK

SEQ ID NO: 5411 - protein, 9 aa, Artificial Sequence
  Description of Artificial Sequence: Synthetic peptide
  N-term H or Acetyl
  MOD_RES (5)..(5): Tyr or Phospho-Tyr
  MOD_RES (7)..(7): Modified Cys
  See specification as filed for detailed description of substitutions and preferred embodiments
EEPIYVCIP

SEQ ID NO: 5412 - protein, 9 aa, Artificial Sequence
  Description of Artificial Sequence: Synthetic peptide
  N-term H or Acetyl
  MOD_RES (5)..(5): Tyr or Phospho-Tyr
  MOD_RES (7)..(7): Modified Cys
  See specification as filed for detailed description of substitutions and preferred embodiments
EEPIYVCMG

SEQ ID NO: 5413 - protein, 9 aa, Artificial Sequence
  Description of Artificial Sequence: Synthetic peptide
  N-term H or Acetyl
  MOD_RES (5)..(5): Tyr or Phospho-Tyr
  MOD_RES (7)..(7): Modified Cys
  See specification as filed for detailed description of substitutions and preferred embodiments
EEPIYVCMK

SEQ ID NO: 5414 - protein, 9 aa, Artificial Sequence
  Description of Artificial Sequence: Synthetic peptide
  N-term H or Acetyl
  MOD_RES (5)..(5): Tyr or Phospho-Tyr
  MOD_RES (7)..(7): Modified Cys
  See specification as filed for detailed description of substitutions and preferred embodiments
EEPIYVCMP

SEQ ID NO: 5415 - protein, 9 aa, Artificial Sequence
  Description of Artificial Sequence: Synthetic peptide
  N-term H or Acetyl
  MOD_RES (5)..(5): Tyr or Phospho-Tyr
  MOD_RES (7)..(7): Modified Cys
  See specification as filed for detailed description of substitutions and preferred embodiments
EEPIYVCVG

SEQ ID NO: 5416 - protein, 9 aa, Artificial Sequence
  Description of Artificial Sequence: Synthetic peptide
  N-term H or Acetyl
  MOD_RES (5)..(5): Tyr or Phospho-Tyr
  MOD_RES (7)..(7): Modified Cys
  See specification as filed for detailed description of substitutions and preferred embodiments
EEPIYVCVK

SEQ ID NO: 5417 - protein, 15 aa, Artificial Sequence
  Description of Artificial Sequence: Synthetic peptide
  N-term H or Acetyl
  MOD_RES (6)..(6): Modified Cys
  MOD_RES (8)..(8): Tyr or Phospho-Tyr
  MOD_RES (9)..(9): Tyr or Phospho-Tyr
  See specification as filed for detailed description of substitutions and preferred embodiments
EEPPDCQYYNDFPGK

SEQ ID NO: 5418 - protein, 15 aa, Artificial Sequence
  Description of Artificial Sequence: Synthetic peptide
  N-term H or Acetyl
  MOD_RES (6)..(6): Modified Cys
  MOD_RES (8)..(8): Tyr or Phospho-Tyr
  See specification as filed for detailed description of substitutions and preferred embodiments
EEPPDCQYYNDFPGK

SEQ ID NO: 5419 - protein, 15 aa, Artificial Sequence
  Description of Artificial Sequence: Synthetic peptide
  N-term H or Acetyl
  MOD_RES (8)..(8): Tyr or Phospho-Tyr
  MOD_RES (10)..(10): Modified Cys
  See specification as filed for detailed description of substitutions and preferred embodiments
EGRNPGFYVCANPMP

SEQ ID NO: 5420 - protein, 15 aa, Artificial Sequence
  Description of Artificial Sequence: Synthetic peptide
  N-term H or Acetyl
  MOD_RES (8)..(8): Tyr or Phospho-Tyr
  MOD_RES (10)..(10): Modified Cys
  See specification as filed for detailed description of substitutions and preferred embodiments
EGSFESRYQCPFEDF

SEQ ID NO: 5421 - protein, 15 aa, Artificial Sequence
  Description of Artificial Sequence: Synthetic peptide
  N-term H or Acetyl
  MOD_RES (8)..(8): Tyr or Phospho-Tyr
  MOD_RES (10)..(10): Modified Cys
  See specification as filed for detailed description of substitutions and preferred embodiments
EPIQEANYVCMTPGT

SEQ ID NO: 5422 - protein, 15 aa, Artificial Sequence
  Description of Artificial Sequence: Synthetic peptide
  N-term H or Acetyl
  MOD_RES (8)..(8): Tyr or Phospho-Tyr
  MOD_RES (10)..(10): Modified Cys
  See specification as filed for detailed description of substitutions and preferred embodiments
EPPDHQYYNCFPGKE

SEQ ID NO: 5423 - protein, 15 aa, Artificial Sequence
  Description of Artificial Sequence: Synthetic peptide
  N-term H or Acetyl
  MOD_RES (8)..(8): Modified Cys
  MOD_RES (10)..(10): Tyr or Phospho-Tyr
  See specification as filed for detailed description of substitutions and preferred embodiments
EQEDEPECDYEEVLE

SEQ ID NO: 5424 - protein, 15 aa, Artificial Sequence
  Description of Artificial Sequence: Synthetic peptide
  N-term H or Acetyl
  MOD_RES (8)..(8): Modified Cys
  MOD_RES (10)..(10): Tyr or Phospho-Tyr
  See specification as filed for detailed description of substitutions and preferred embodiments
EQEDEPECDYFEWLE

SEQ ID NO: 5425 - protein, 15 aa, Artificial Sequence
  Description of Artificial Sequence: Synthetic peptide
  N-term H or Acetyl
  MOD_RES (10)..(10): Tyr or Phospho-Tyr
  MOD_RES (12)..(12): Modified Cys
  See specification as filed for detailed description of substitutions and preferred embodiments
EQEDEPEGDYECVLE

SEQ ID NO: 5426 - protein, 15 aa, Artificial Sequence
  Description of Artificial Sequence: Synthetic peptide
  N-term H or Acetyl
  MOD_RES (10)..(10): Tyr or Phospho-Tyr
  MOD_RES (12)..(12): Modified Cys
  See specification as filed for detailed description of substitutions and preferred embodiments
EQEDEPEGDYFCWLE

SEQ ID NO: 5427 - protein, 15 aa, Artificial Sequence
  Description of Artificial Sequence: Synthetic peptide
  N-term H or Acetyl
  MOD_RES (8)..(8): Tyr or Phospho-Tyr
  MOD_RES (10)..(10): Modified Cys
  See specification as filed for detailed description of substitutions and preferred embodiments
EVSETDDYACIIDEE

SEQ ID NO: 5428 - protein, 15 aa, Artificial Sequence
  Description of Artificial Sequence: Synthetic peptide
  N-term H or Acetyl
  MOD_RES (6)..(6): Modified Cys
  MOD_RES (8)..(8): Tyr or Phospho-Tyr
  MOD_RES (9)..(9): Tyr or Phospho-Tyr
  See specification as filed for detailed description of substitutions and preferred embodiments
FAGKECTYYQGRHLG

SEQ ID NO: 5429 - protein, 15 aa, Artificial Sequence
  Description of Artificial Sequence: Synthetic peptide
  N-term H or Acetyl
  MOD_RES (6)..(6): Modified Cys
  MOD_RES (8)..(8): Tyr or Phospho-Tyr
  See specification as filed for detailed description of substitutions and preferred embodiments
FAGKECTYYQGRHLG

SEQ ID NO: 5430 - protein, 15 aa, Artificial Sequence
  Description of Artificial Sequence: Synthetic peptide
  N-term H or Acetyl
  MOD_RES (3)..(3): Leu or Nle (i.e. isomer of Leucine)
  MOD_RES (6)..(6): Modified Cys
  MOD_RES (8)..(8): Tyr or Phospho-Tyr
  See specification as filed for detailed description of substitutions and preferred embodiments
FDLDRCIYRMSFFRK

SEQ ID NO: 5431 - protein, 15 aa, Artificial Sequence
  Description of Artificial Sequence: Synthetic peptide
  N-term H or Acetyl
  MOD_RES (3)..(3): Leu or Nle (i.e. isomer of Leucine)
  MOD_RES (8)..(8): Tyr or Phospho-Tyr
  MOD_RES (10)..(10): Modified Cys
  See specification as filed for detailed description of substitutions and preferred embodiments
FDLDRDIYRCSFFRK

SEQ ID NO: 5432 - protein, 15 aa, Artificial Sequence
  Description of Artificial Sequence: Synthetic peptide
  N-term H or Acetyl
  MOD_RES (8)..(8): Tyr or Phospho-Tyr
  MOD_RES (10)..(10): Modified Cys
  See specification as filed for detailed description of substitutions and preferred embodiments
FDKDGNGYICAAELR

SEQ ID NO: 5433 - protein, 15 aa, Artificial Sequence
  Description of Artificial Sequence: Synthetic peptide
  N-term H or Acetyl
  MOD_RES (6)..(6): Modified Cys
  MOD_RES (8)..(8): Tyr or Phospho-Tyr
  See specification as filed for detailed description of substitutions and preferred embodiments
FDMDRCIYRMSFFRK

SEQ ID NO: 5434 - protein, 15 aa, Artificial Sequence
  Description of Artificial Sequence: Synthetic peptide
  N-term H or Acetyl
  MOD_RES (8)..(8): Tyr or Phospho-Tyr
  MOD_RES (10)..(10): Modified Cys
  See specification as filed for detailed description of substitutions and preferred embodiments
FDMDRDIYRCSFFRK

SEQ ID NO: 5435 - protein, 8 aa, Artificial Sequence
  Description of Artificial Sequence: Synthetic peptide
  N-term H or Acetyl
  MOD_RES (6)..(6): Tyr or Phospho-Tyr
  MOD_RES (8)..(8): Modified Cys
  See specification as filed for detailed description of substitutions and preferred embodiments
FEEEEYIC

SEQ ID NO: 5436 - protein, 9 aa, Artificial Sequence
  Description of Artificial Sequence: Synthetic peptide
  N-term H or Acetyl
  MOD_RES (5)..(5): Tyr or Phospho-Tyr
  MOD_RES (7)..(7): Modified Cys
  See specification as filed for detailed description of substitutions and preferred embodiments
FEEEYICIV

SEQ ID NO: 5437 - protein, 15 aa, Artificial Sequence
  Description of Artificial Sequence: Synthetic peptide
  N-term H or Acetyl
  MOD_RES (6)..(6): Modified Cys
  MOD_RES (8)..(8): Tyr or Phospho-Tyr
  See specification as filed for detailed description of substitutions and preferred embodiments
FTDRLCQYISTRGLG

SEQ ID NO: 5438 - protein, 15 aa, Artificial Sequence
  Description of Artificial Sequence: Synthetic peptide
  N-term H or Acetyl
  MOD_RES (8)..(8): Tyr or Phospho-Tyr
  MOD_RES (10)..(10): Modified Cys
  See specification as filed for detailed description of substitutions and preferred embodiments
FTDRLQQYICTRGLG

SEQ ID NO: 5439 - protein, 15 aa, Artificial Sequence
  Description of Artificial Sequence: Synthetic peptide
  N-term H or Acetyl
  MOD_RES (8)..(8): Tyr or Phospho-Tyr
  MOD_RES (10)..(10): Modified Cys
  See specification as filed for detailed description of substitutions and preferred embodiments
FVSETDDYACIIDEE

SEQ ID NO: 5440 - protein, 15 aa, Artificial Sequence
  Description of Artificial Sequence: Synthetic peptide
  N-term H or Acetyl
  MOD_RES (8)..(8): Tyr or Phospho-Tyr
  MOD_RES (10)..(10): Modified Cys
  See specification as filed for detailed description of substitutions and preferred embodiments
FYEEIKKYECLETEE

SEQ ID NO: 5441 - protein, 16 aa, Artificial Sequence
  Description of Artificial Sequence: Synthetic peptide
  N-term H or Acetyl
  MOD_RES (7)..(7): Tyr or Phospho-Tyr
  MOD_RES (9)..(9): Modified Cys
  See specification as filed for detailed description of substitutions and preferred embodiments
GAEDPEYICIPAKKKG

SEQ ID NO: 5442 - protein, 16 aa, Artificial Sequence
  Description of Artificial Sequence: Synthetic peptide
  N-term H or Acetyl
  MOD_RES (7)..(7): Tyr or Phospho-Tyr
  MOD_RES (9)..(9): Modified Cys
  See specification as filed for detailed description of substitutions and preferred embodiments
GAEEPDYICFGAKKKG

SEQ ID NO: 5443 - protein, 16 aa, Artificial Sequence
  Description of Artificial Sequence: Synthetic peptide
  N-term H or Acetyl
  MOD_RES (7)..(7): Tyr or Phospho-Tyr
  MOD_RES (9)..(9): Modified Cys
  See specification as filed for detailed description of substitutions and preferred embodiments
GAEEPEYICFGAKKKG

SEQ ID NO: 5444 - protein, 16 aa, Artificial Sequence
  Description of Artificial Sequence: Synthetic peptide
  N-term H or Acetyl
  MOD_RES (7)..(7): Tyr or Phospho-Tyr
  MOD_RES (9)..(9): Modified Cys
  See specification as filed for detailed description of substitutions and preferred embodiments
GAEEPEYICVKAKKKG

SEQ ID NO: 5445 - protein, 16 aa, Artificial Sequence
  Description of Artificial Sequence: Synthetic peptide
  N-term H or Acetyl
  MOD_RES (7)..(7): Tyr or Phospho-Tyr
  MOD_RES (9)..(9): Modified Cys
  MOD_RES (10)..(10): Leu or Nle (i.e. isomer of Leucine)
  See specification as filed for detailed description of substitutions and preferred embodiments
GAEEPIYICLPAKKKG

SEQ ID NO: 5446 - protein, 16 aa, Artificial Sequence
  Description of Artificial Sequence: Synthetic peptide
  N-term H or Acetyl
  MOD_RES (7)..(7): Tyr or Phospho-Tyr
  MOD_RES (9)..(9): Modified Cys
  See specification as filed for detailed description of substitutions and preferred embodiments
GAEEPIYICFGAKKKG

SEQ ID NO: 5447 - protein, 16 aa, Artificial Sequence
  Description of Artificial Sequence: Synthetic peptide
  N-term H or Acetyl
  MOD_RES (7)..(7): Tyr or Phospho-Tyr
  MOD_RES (9)..(9): Modified Cys
  See specification as filed for detailed description of substitutions and preferred embodiments
GAEEPIYVCFGAKKKG

SEQ ID NO: 5448 - protein, 16 aa, Artificial Sequence
  Description of Artificial Sequence: Synthetic peptide
  N-term H or Acetyl
  MOD_RES (7)..(7): Tyr or Phospho-Tyr
  MOD_RES (9)..(9): Modified Cys
  See specification as filed for detailed description of substitutions and preferred embodiments
GAEEPIYVCVKAKKKG

SEQ ID NO: 5449 - protein, 16 aa, Artificial Sequence
  Description of Artificial Sequence: Synthetic peptide
  N-term H or Acetyl
  MOD_RES (7)..(7): Tyr or Phospho-Tyr
  MOD_RES (9)..(9): Modified Cys
  See specification as filed for detailed description of substitutions and preferred embodiments
GAEEPIYVCVPAKKKG

SEQ ID NO: 5450 - protein, 18 aa, Artificial Sequence
  Description of Artificial Sequence: Synthetic peptide
  N-term H or Acetyl
  MOD_RES (6)..(6): Modified Cys
  MOD_RES (8)..(8): Tyr or Phospho-Tyr
  MOD_RES (9)..(9): Tyr or Phospho-Tyr
  MOD_RES (10)..(10): Tyr or Phospho-Tyr
  See specification as filed for detailed description of substitutions and preferred embodiments
GAGEECDYYYIWAGKKKK

SEQ ID NO: 5451 - protein, 13 aa, Artificial Sequence
  Description of Artificial Sequence: Synthetic peptide
  N-term H or Acetyl
  MOD_RES (2)..(2): Modified Cys
  MOD_RES (4)..(4): Tyr or Phospho-Tyr
  See specification as filed for detailed description of substitutions and preferred embodiments
GCNYRGYSLGNWV

SEQ ID NO: 5452 - protein, 15 aa, Artificial Sequence
  Description of Artificial Sequence: Synthetic peptide
  N-term H or Acetyl
  MOD_RES (6)..(6): Modified Cys
  MOD_RES (8)..(8): Tyr or Phospho-Tyr
  MOD_RES (9)..(9): Tyr or Phospho-Tyr
  See specification as filed for detailed description of substitutions and preferred embodiments
GDGSDCPYYNSIPSK

SEQ ID NO: 5453 - protein, 15 aa, Artificial Sequence
  Description of Artificial Sequence: Synthetic peptide
  N-term H or Acetyl
  MOD_RES (6)..(6): Modified Cys
  MOD_RES (8)..(8): Tyr or Phospho-Tyr
  See specification as filed for detailed description of substitutions and preferred embodiments
GDGSDCPYYNSIPSK

SEQ ID NO: 5454 - protein, 8 aa, Artificial Sequence
  Description of Artificial Sequence: Synthetic peptide
  N-term H or Acetyl
  MOD_RES (6)..(6): Tyr or Phospho-Tyr
  MOD_RES (8)..(8): Modified Cys
  See specification as filed for detailed description of substitutions and preferred embodiments
GEEEEYIC

SEQ ID NO: 5455 - protein, 9 aa, Artificial Sequence
  Description of Artificial Sequence: Synthetic peptide
  N-term H or Acetyl
  MOD_RES (5)..(5): Tyr or Phospho-Tyr
  MOD_RES (7)..(7): Modified Cys
  See specification as filed for detailed description of substitutions and preferred embodiments
GEEEYICIV

SEQ ID NO: 5456 - protein, 15 aa, Artificial Sequence
  Description of Artificial Sequence: Synthetic peptide
  N-term H or Acetyl
  MOD_RES (8)..(8): Tyr or Phospho-Tyr
  MOD_RES (10)..(10): Modified Cys
  See specification as filed for detailed description of substitutions and preferred embodiments
GGPEPGPYACPSVNT

SEQ ID NO: 5457 - protein, 21 aa, Artificial Sequence
  Description of Artificial Sequence: Synthetic peptide
  N-term H or Acetyl
  MOD_RES (7)..(7): Modified Cys
  MOD_RES (9)..(9): Thr or Phospho-Thr
  See specification as filed for detailed description of substitutions and preferred embodiments
GLPWWRCYTWVVERDVNTKQR

SEQ ID NO: 5458 - protein, 15 aa, Artificial Sequence
  Description of Artificial Sequence: Synthetic peptide
  N-term H or Acetyl
  MOD_RES (8)..(8): Tyr or Phospho-Tyr
  MOD_RES (10)..(10): Modified Cys
  MOD_RES (11)..(11): Leu or Nle (i.e. isomer of Leucine)
  See specification as filed for detailed description of substitutions and preferred embodiments
GSNQEEAYVCLSSFY

SEQ ID NO: 5459 - protein, 15 aa, Artificial Sequence
  Description of Artificial Sequence: Synthetic peptide
  N-term H or Acetyl
  MOD_RES (8)..(8): Tyr or Phospho-Tyr
  MOD_RES (10)..(10): Modified Cys
  See specification as filed for detailed description of substitutions and preferred embodiments
GVSETDDYACIIDEE

SEQ ID NO: 5460 - protein, 12 aa, Artificial Sequence
  Description of Artificial Sequence: Synthetic peptide
  N-term H or Acetyl
  MOD_RES (8)..(8): Tyr or Phospho-Tyr
  MOD_RES (10)..(10): Modified Cys
  See specification as filed for detailed description of substitutions and preferred embodiments
HDLGEDIYDCVP

SEQ ID NO: 5461 - protein, 8 aa, Artificial Sequence
  Description of Artificial Sequence: Synthetic peptide
  N-term H or Acetyl
  MOD_RES (6)..(6): Tyr or Phospho-Tyr
  MOD_RES (8)..(8): Modified Cys
  See specification as filed for detailed description of substitutions and preferred embodiments
HEEEEYIC

SEQ ID NO: 5462 - protein, 9 aa, Artificial Sequence
  Description of Artificial Sequence: Synthetic peptide
  N-term H or Acetyl
  MOD_RES (5)..(5): Tyr or Phospho-Tyr
  MOD_RES (7)..(7): Modified Cys
  See specification as filed for detailed description of substitutions and preferred embodiments
HEEEYICIV

SEQ ID NO: 5463 - protein, 15 aa, Artificial Sequence
  Description of Artificial Sequence: Synthetic peptide
  N-term H or Acetyl
  MOD_RES (6)..(6): Modified Cys
  MOD_RES (8)..(8): Tyr or Phospho-Tyr
  MOD_RES (15)..(15): Tyr or Phospho-Tyr
  See specification as filed for detailed description of substitutions and preferred embodiments
HRIDGCTYVIKRVKY

SEQ ID NO: 5464 - protein, 15 aa, Artificial Sequence
  Description of Artificial Sequence: Synthetic peptide
  N-term H or Acetyl
  MOD_RES (8)..(8): Tyr or Phospho-Tyr
  MOD_RES (10)..(10): Modified Cys
  See specification as filed for detailed description of substitutions and preferred embodiments
HRIDGKTYVCKRVKY

SEQ ID NO: 5465 - protein, 14 aa, Artificial Sequence
  Description of Artificial Sequence: Synthetic peptide
  N-term H or Acetyl
  MOD_RES (6)..(6): Tyr or Phospho-Tyr
  MOD_RES (8)..(8): Modified Cys
  See specification as filed for detailed description of substitutions and preferred embodiments
HVNATYVCVKSVAP

SEQ ID NO: 5466 - protein, 15 aa, Artificial Sequence
  Description of Artificial Sequence: Synthetic peptide
  N-term H or Acetyl
  MOD_RES (8)..(8): Tyr or Phospho-Tyr
  MOD_RES (10)..(10): Modified Cys
  See specification as filed for detailed description of substitutions and preferred embodiments
HVSETDDYACIIDEE

SEQ ID NO: 5467 - protein, 8 aa, Artificial Sequence
  Description of Artificial Sequence: Synthetic peptide
  N-term H or Acetyl
  MOD_RES (6)..(6): Tyr or Phospho-Tyr
  MOD_RES (8)..(8): Modified Cys
  See specification as filed for detailed description of substitutions and preferred embodiments
IEEEEYIC

SEQ ID NO: 5468 - protein, 9 aa, Artificial Sequence
  Description of Artificial Sequence: Synthetic peptide
  N-term H or Acetyl
  MOD_RES (5)..(5): Tyr or Phospho-Tyr
  MOD_RES (7)..(7): Modified Cys
  See specification as filed for detailed description of substitutions and preferred embodiments
IEEEYICIV

SEQ ID NO: 5469 - protein, 15 aa, Artificial Sequence
  Description of Artificial Sequence: Synthetic peptide
  N-term H or Acetyl
  MOD_RES (8)..(8): Tyr or Phospho-Tyr
  MOD_RES (10)..(10): Modified Cys
  See specification as filed for detailed description of substitutions and preferred embodiments
IENEEQEYVCTVKSS

SEQ ID NO: 5470 - protein, 15 aa, Artificial Sequence
  Description of Artificial Sequence: Synthetic peptide
  N-term H or Acetyl
  MOD_RES (6)..(6): Modified Cys
  MOD_RES (8)..(8): Tyr or Phospho-Tyr
  See specification as filed for detailed description of substitutions and preferred embodiments
IGTAECDYGALYEGR

SEQ ID NO: 5471 - protein, 15 aa, Artificial Sequence
  Description of Artificial Sequence: Synthetic peptide
  N-term H or Acetyl
  MOD_RES (8)..(8): Tyr or Phospho-Tyr
  MOD_RES (10)..(10): Modified Cys
  See specification as filed for detailed description of substitutions and preferred embodiments
ISLDNPDYQCDFFPK

SEQ ID NO: 5472 - protein, 15 aa, Artificial Sequence
  Description of Artificial Sequence: Synthetic peptide
  N-term H or Acetyl
  MOD_RES (8)..(8): Tyr or Phospho-Tyr
  MOD_RES (10)..(10): Modified Cys
  See specification as filed for detailed description of substitutions and preferred embodiments
IVSETDDYACIIDEE

SEQ ID NO: 5473 - protein, 12 aa, Artificial Sequence
  Description of Artificial Sequence: Synthetic peptide
  N-term H or Acetyl
  MOD_RES (7)..(7): Tyr or Phospho-Tyr
  MOD_RES (9)..(9): Modified Cys
  See specification as filed for detailed description of substitutions and preferred embodiments
KAEEEEYICLVA

SEQ ID NO: 5474 - protein, 8 aa, Artificial Sequence
  Description of Artificial Sequence: Synthetic peptide
  N-term H or Acetyl
  MOD_RES (6)..(6): Tyr or Phospho-Tyr
  MOD_RES (8)..(8): Modified Cys
  See specification as filed for detailed description of substitutions and preferred embodiments
KEEEEYIC

SEQ ID NO: 5475 - protein, 9 aa, Artificial Sequence
  Description of Artificial Sequence: Synthetic peptide
  N-term H or Acetyl
  MOD_RES (5)..(5): Tyr or Phospho-Tyr
  MOD_RES (7)..(7): Modified Cys
  See specification as filed for detailed description of substitutions and preferred embodiments
KEEEYICIV

SEQ ID NO: 5476 - protein, 15 aa, Artificial Sequence
  Description of Artificial Sequence: Synthetic peptide
  N-term H or Acetyl
  MOD_RES (8)..(8): Tyr or Phospho-Tyr
  MOD_RES (10)..(10): Modified Cys
  See specification as filed for detailed description of substitutions and preferred embodiments
KEVHKSGYLCSERLI

SEQ ID NO: 5477 - protein, 15 aa, Artificial Sequence
  Description of Artificial Sequence: Synthetic peptide
  N-term H or Acetyl
  MOD_RES (8)..(8): Tyr or Phospho-Tyr
  MOD_RES (10)..(10): Modified Cys
  See specification as filed for detailed description of substitutions and preferred embodiments
KGDKQVEYLCLDLDS

SEQ ID NO: 5478 - protein, 13 aa, Artificial Sequence
  Description of Artificial Sequence: Synthetic peptide
  N-term H or Acetyl
  MOD_RES (8)..(8): Tyr or Phospho-Tyr
  MOD_RES (10)..(10): Modified Cys
  See specification as filed for detailed description of substitutions and preferred embodiments
KKAEEEEYICLVA

SEQ ID NO: 5479 - protein, 12 aa, Artificial Sequence
  Description of Artificial Sequence: Synthetic peptide
  N-term H or Acetyl
  MOD_RES (7)..(7): Tyr or Phospho-Tyr
  MOD_RES (9)..(9): Modified Cys
  See specification as filed for detailed description of substitutions and preferred embodiments
KKEEEIYFCFWG

SEQ ID NO: 5480 - protein, 12 aa, Artificial Sequence
  Description of Artificial Sequence: Synthetic peptide
  N-term H or Acetyl
  MOD_RES (5)..(5): Modified Cys
  MOD_RES (7)..(7): Tyr or Phospho-Tyr
  See specification as filed for detailed description of substitutions and preferred embodiments
KKGECIYAAPFA

SEQ ID NO: 5481 - protein, 14 aa, Artificial Sequence
  Description of Artificial Sequence: Synthetic peptide
  N-term H or Acetyl
  MOD_RES (9)..(9): Tyr or Phospho-Tyr
  MOD_RES (11)..(11): Modified Cys
  See specification as filed for detailed description of substitutions and preferred embodiments
KKKAEEEEYICLVA

SEQ ID NO: 5482 - protein, 13 aa, Artificial Sequence
  Description of Artificial Sequence: Synthetic peptide
  N-term H or Acetyl
  MOD_RES (9)..(9): Tyr or Phospho-Tyr
  MOD_RES (11)..(11): Modified Cys
  See specification as filed for detailed description of substitutions and preferred embodiments
KKKAEEEEYICLV

SEQ ID NO: 5483 - protein, 12 aa, Artificial Sequence
  Description of Artificial Sequence: Synthetic peptide
  N-term H or Acetyl
  MOD_RES (9)..(9): Tyr or Phospho-Tyr
  MOD_RES (11)..(11): Modified Cys
  See specification as filed for detailed description of substitutions and preferred embodiments
KKKAEEEEYICL

SEQ ID NO: 5484 - protein, 11 aa, Artificial Sequence
  Description of Artificial Sequence: Synthetic peptide
  N-term H or Acetyl
  MOD_RES (9)..(9): Tyr or Phospho-Tyr
  MOD_RES (11)..(11): Modified Cys
  See specification as filed for detailed description of substitutions and preferred embodiments
KKKAEEEEYIC

SEQ ID NO: 5485 - protein, 15 aa, Artificial Sequence
  Description of Artificial Sequence: Synthetic peptide
  N-term H or Acetyl
  MOD_RES (11)..(11): Tyr or Phospho-Tyr
  MOD_RES (13)..(13): Modified Cys
  See specification as filed for detailed description of substitutions and preferred embodiments
KKKAEPLPPSYVCAS

SEQ ID NO: 5486 - protein, 12 aa, Artificial Sequence
  Description of Artificial Sequence: Synthetic peptide
  N-term H or Acetyl
  MOD_RES (8)..(8): Tyr or Phospho-Tyr
  MOD_RES (10)..(10): Modified Cys
  See specification as filed for detailed description of substitutions and preferred embodiments
KKKDEQIYWCIA

SEQ ID NO: 5487 - protein, 18 aa, Artificial Sequence
  Description of Artificial Sequence: Synthetic peptide
  N-term H or Acetyl
  MOD_RES (11)..(11): Tyr or Phospho-Tyr
  MOD_RES (13)..(13): Modified Cys
  See specification as filed for detailed description of substitutions and preferred embodiments
KKKDNVLINTYSCVLKIS

SEQ ID NO: 5488 - protein, 13 aa, Artificial Sequence
  Description of Artificial Sequence: Synthetic peptide
  N-term H or Acetyl
  MOD_RES (8)..(8): Tyr or Phospho-Tyr
  MOD_RES (10)..(10): Modified Cys
  See specification as filed for detailed description of substitutions and preferred embodiments
KKKEEEIYFCFWG

SEQ ID NO: 5489 - protein, 12 aa, Artificial Sequence
  Description of Artificial Sequence: Synthetic peptide
  N-term H or Acetyl
  MOD_RES (6)..(6): Modified Cys
  MOD_RES (8)..(8): Tyr or Phospho-Tyr
  See specification as filed for detailed description of substitutions and preferred embodiments
KKKKECIYFFFG

SEQ ID NO: 5490 - protein, 14 aa, Artificial Sequence
  Description of Artificial Sequence: Synthetic peptide
  N-term H or Acetyl
  MOD_RES (9)..(9): Tyr or Phospho-Tyr
  MOD_RES (11)..(11): Modified Cys
  See specification as filed for detailed description of substitutions and preferred embodiments
KKKKEEEIYFCFWG

SEQ ID NO: 5491 - protein, 15 aa, Artificial Sequence
  Description of Artificial Sequence: Synthetic peptide
  N-term H or Acetyl
  MOD_RES (9)..(9): Tyr or Phospho-Tyr
  MOD_RES (11)..(11): Modified Cys
  See specification as filed for detailed description of substitutions and preferred embodiments
KKKLSRSLYFCPLLH

SEQ ID NO: 5492 - protein, 16 aa, Artificial Sequence
  Description of Artificial Sequence: Synthetic peptide
  N-term H or Acetyl
  MOD_RES (9)..(9): Tyr or Phospho-Tyr
  MOD_RES (11)..(11): Modified Cys
  See specification as filed for detailed description of substitutions and preferred embodiments
KKKLTIDRYLCIVHAV

SEQ ID NO: 5493 - protein, 18 aa, Artificial Sequence
  Description of Artificial Sequence: Synthetic peptide
  N-term H or Acetyl
  MOD_RES (11)..(11): Tyr or Phospho-Tyr
  MOD_RES (13)..(13): Modified Cys
  See specification as filed for detailed description of substitutions and preferred embodiments
KKKNHIGHTGYLCTVTVS

SEQ ID NO: 5494 - protein, 18 aa, Artificial Sequence
  Description of Artificial Sequence: Synthetic peptide
  N-term H or Acetyl
  MOD_RES (13)..(13): Modified Cys
  MOD_RES (15)..(15): Tyr or Phospho-Tyr
  See specification as filed for detailed description of substitutions and preferred embodiments
KKKQAATGFGSPCQYSAD

SEQ ID NO: 5495 - protein, 15 aa, Artificial Sequence
  Description of Artificial Sequence: Synthetic peptide
  N-term H or Acetyl
  MOD_RES (10)..(10): Tyr or Phospho-Tyr
  MOD_RES (12)..(12): Modified Cys
  See specification as filed for detailed description of substitutions and preferred embodiments
KKKRAHEEIYFCFWG

SEQ ID NO: 5496 - protein, 18 aa, Artificial Sequence
  Description of Artificial Sequence: Synthetic peptide
  N-term H or Acetyl
  MOD_RES (13)..(13): Modified Cys
  MOD_RES (15)..(15): Tyr or Phospho-Tyr
  See specification as filed for detailed description of substitutions and preferred embodiments
KKKSNPALLSSPCYYSAA

SEQ ID NO: 5497 - protein, 16 aa, Artificial Sequence
  Description of Artificial Sequence: Synthetic peptide
  N-term H or Acetyl
  MOD_RES (7)..(7): Leu or Nle (i.e. isomer of Leucine)
  MOD_RES (8)..(8): Leu or Nle (i.e. isomer of Leucine)
  MOD_RES (9)..(9): Thr or Phospho-Thr
  MOD_RES (11)..(11): Tyr or Phospho-Tyr
  MOD_RES (13)..(13): Modified Cys
  See specification as filed for detailed description of substitutions and preferred embodiments
KKKTSFLLTPYVCTRY

SEQ ID NO: 5498 - protein, 13 aa, Artificial Sequence
  Description of Artificial Sequence: Synthetic peptide
  N-term H or Acetyl
  MOD_RES (5)..(5): Modified Cys
  MOD_RES (7)..(7): Tyr or Phospho-Tyr
  MOD_RES (8)..(8): Leu or Nle (i.e. isomer of Leucine)
  MOD_RES (10)..(10): Leu or Nle (i.e. isomer of Leucine)
  See specification as filed for detailed description of substitutions and preferred embodiments
KKSRCDYLTLQIG

SEQ ID NO: 5499 - protein, 20 aa, Artificial Sequence
  Description of Artificial Sequence: Synthetic peptide
  N-term H or Acetyl
  MOD_RES (14)..(14): Tyr or Phospho-Tyr
  MOD_RES (16)..(16): Modified Cys
  See specification as filed for detailed description of substitutions and preferred embodiments
KKTNSSEGLSMGNYICLINR

SEQ ID NO: 5500 - protein, 15 aa, Artificial Sequence
  Description of Artificial Sequence: Synthetic peptide
  N-term H or Acetyl
  MOD_RES (8)..(8): Tyr or Phospho-Tyr
  MOD_RES (10)..(10): Modified Cys
  See specification as filed for detailed description of substitutions and preferred embodiments
KVSETDDYACIIDEE

SEQ ID NO: 5501 - protein, 8 aa, Artificial Sequence
  Description of Artificial Sequence: Synthetic peptide
  N-term H or Acetyl
  MOD_RES (6)..(6): Tyr or Phospho-Tyr
  MOD_RES (8)..(8): Modified Cys
  See specification as filed for detailed description of substitutions and preferred embodiments
LEEEEYIC

SEQ ID NO: 5502 - protein, 9 aa, Artificial Sequence
  Description of Artificial Sequence: Synthetic peptide
  N-term H or Acetyl
  MOD_RES (5)..(5): Tyr or Phospho-Tyr
  MOD_RES (7)..(7): Modified Cys
  See specification as filed for detailed description of substitutions and preferred embodiments
LEEEYICIV

SEQ ID NO: 5503 - protein, 15 aa, Artificial Sequence
  Description of Artificial Sequence: Synthetic peptide
  N-term H or Acetyl
  MOD_RES (8)..(8): Tyr or Phospho-Tyr
  MOD_RES (10)..(10): Modified Cys
  See specification as filed for detailed description of substitutions and preferred embodiments
LHQEDNDYICASLIK

SEQ ID NO: 5504 - protein, 15 aa, Artificial Sequence
  Description of Artificial Sequence: Synthetic peptide
  N-term H or Acetyl
  MOD_RES (8)..(8): Tyr or Phospho-Tyr
  MOD_RES (11)..(11): Modified Cys
  See specification as filed for detailed description of substitutions and preferred embodiments
LHQEDNDYINCSLIK

SEQ ID NO: 5505 - protein, 15 aa, Artificial Sequence
  Description of Artificial Sequence: Synthetic peptide
  N-term H or Acetyl
  MOD_RES (8)..(8): Tyr or Phospho-Tyr
  MOD_RES (10)..(10): Modified Cys
  See specification as filed for detailed description of substitutions and preferred embodiments
LMLRLQDYECKTKKA

SEQ ID NO: 5506 - protein, 20 aa, Artificial Sequence
  Description of Artificial Sequence: Synthetic peptide
  N-term H or Acetyl
  MOD_RES (9)..(9): Modified Cys
  MOD_RES (11)..(11): Tyr or Phospho-Tyr
  See specification as filed for detailed description of substitutions and preferred embodiments
LSRDLIMKCDYELVSTKPTR

SEQ ID NO: 5507 - protein, 20 aa, Artificial Sequence
  Description of Artificial Sequence: Synthetic peptide
  N-term H or Acetyl
  MOD_RES (11)..(11): Tyr or Phospho-Tyr
  MOD_RES (13)..(13): Modified Cys
  See specification as filed for detailed description of substitutions and preferred embodiments
LSRDLIMKEDYECVSTKPTR

SEQ ID NO: 5508 - protein, 17 aa, Artificial Sequence
  Description of Artificial Sequence: Synthetic peptide
  N-term H or Acetyl
  MOD_RES (11)..(11): Tyr or Phospho-Tyr
  MOD_RES (13)..(13): Modified Cys
  See specification as filed for detailed description of substitutions and preferred embodiments
LSRDLIMKEDYECVSTK

SEQ ID NO: 5509 - protein, 15 aa, Artificial Sequence
  Description of Artificial Sequence: Synthetic peptide
  N-term H or Acetyl
  MOD_RES (8)..(8): Tyr or Phospho-Tyr
  MOD_RES (10)..(10): Modified Cys
  See specification as filed for detailed description of substitutions and preferred embodiments
LVSETDDYACIIDEE

SEQ ID NO: 5510 - protein, 15 aa, Artificial Sequence
  Description of Artificial Sequence: Synthetic peptide
  N-term H or Acetyl
  MOD_RES (8)..(8): Tyr or Phospho-Tyr
  MOD_RES (10)..(10): Modified Cys
  See specification as filed for detailed description of substitutions and preferred embodiments
MAEEKKAYKCAKERE

SEQ ID NO: 5511 - protein, 8 aa, Artificial Sequence
  Description of Artificial Sequence: Synthetic peptide
  N-term H or Acetyl
  MOD_RES (6)..(6): Tyr or Phospho-Tyr
  MOD_RES (8)..(8): Modified Cys
  See specification as filed for detailed description of substitutions and preferred embodiments
MEEEEYIC

SEQ ID NO: 5512 - protein, 9 aa, Artificial Sequence
  Description of Artificial Sequence: Synthetic peptide
  N-term H or Acetyl
  MOD_RES (5)..(5): Tyr or Phospho-Tyr
  MOD_RES (7)..(7): Modified Cys
  See specification as filed for detailed description of substitutions and preferred embodiments
MEEEYICIV

SEQ ID NO: 5513 - protein, 19 aa, Artificial Sequence
  Description of Artificial Sequence: Synthetic peptide
  N-term H or Acetyl
  MOD_RES (3)..(3): Modified Cys
  MOD_RES (5)..(5): Tyr or Phospho-Tyr
  See specification as filed for detailed description of substitutions and preferred embodiments
MKCDYELVSTKPTRTSKVR

SEQ ID NO: 5514 - protein, 15 aa, Artificial Sequence
  Description of Artificial Sequence: Synthetic peptide
  N-term H or Acetyl
  MOD_RES (6)..(6): Modified Cys
  MOD_RES (8)..(8): Tyr or Phospho-Tyr
  See specification as filed for detailed description of substitutions and preferred embodiments
MQDNSCTYGKIWEGS

SEQ ID NO: 5515 - protein, 15 aa, Artificial Sequence
  Description of Artificial Sequence: Synthetic peptide
  N-term H or Acetyl
  MOD_RES (8)..(8): Tyr or Phospho-Tyr
  MOD_RES (10)..(10): Modified Cys
  See specification as filed for detailed description of substitutions and preferred embodiments
MRHVSISYDCPPTPG

SEQ ID NO: 5516 - protein, 8 aa, Artificial Sequence
  Description of Artificial Sequence: Synthetic peptide
  N-term H or Acetyl
  MOD_RES (6)..(6): Tyr or Phospho-Tyr
  MOD_RES (8)..(8): Modified Cys
  See specification as filed for detailed description of substitutions and preferred embodiments
NEEEEYIC

SEQ ID NO: 5517 - protein, 9 aa, Artificial Sequence
  Description of Artificial Sequence: Synthetic peptide
  N-term H or Acetyl
  MOD_RES (5)..(5): Tyr or Phospho-Tyr
  MOD_RES (7)..(7): Modified Cys
  See specification as filed for detailed description of substitutions and preferred embodiments
NEEEYICIV

SEQ ID NO: 5518 - protein, 15 aa, Artificial Sequence
  Description of Artificial Sequence: Synthetic peptide
  N-term H or Acetyl
  MOD_RES (8)..(8): Tyr or Phospho-Tyr
  MOD_RES (10)..(10): Modified Cys
  See specification as filed for detailed description of substitutions and preferred embodiments
NFANFSAYPCEEDMI

SEQ ID NO: 5519 - protein, 19 aa, Artificial Sequence
  Description of Artificial Sequence: Synthetic peptide
  N-term H or Acetyl
  MOD_RES (5)..(5): Modified Cys
  MOD_RES (8)..(8): Tyr or Phospho-Tyr
  See specification as filed for detailed description of substitutions and preferred embodiments
NHIGCTGYLNTVTVSAKKK

SEQ ID NO: 5520 - protein, 15 aa, Artificial Sequence
  Description of Artificial Sequence: Synthetic peptide
  N-term H or Acetyl
  MOD_RES (6)..(6): Modified Cys
  MOD_RES (8)..(8): Tyr or Phospho-Tyr
  See specification as filed for detailed description of substitutions and preferred embodiments
NKVDDCNYAIKRIRL

SEQ ID NO: 5521 - protein, 15 aa, Artificial Sequence
  Description of Artificial Sequence: Synthetic peptide
  N-term H or Acetyl
  MOD_RES (8)..(8): Tyr or Phospho-Tyr
  MOD_RES (10)..(10): Modified Cys
  See specification as filed for detailed description of substitutions and preferred embodiments
NKVDDCNYACKRIRL

SEQ ID NO: 5522 - protein, 15 aa, Artificial Sequence
  Description of Artificial Sequence: Synthetic peptide
  N-term H or Acetyl
  MOD_RES (8)..(8): Tyr or Phospho-Tyr
  MOD_RES (10)..(10): Modified Cys
  See specification as filed for detailed description of substitutions and preferred embodiments
NVSETDDYACIIDEE

SEQ ID NO: 5523 - protein, 15 aa, Artificial Sequence
  Description of Artificial Sequence: Synthetic peptide
  N-term H or Acetyl
  MOD_RES (8)..(8): Tyr or Phospho-Tyr
  MOD_RES (10)..(10): Modified Cys
  See specification as filed for detailed description of substitutions and preferred embodiments
PAFDNLYYWCQDPPE

SEQ ID NO: 5524 - protein, 8 aa, Artificial Sequence
  Description of Artificial Sequence: Synthetic peptide
  N-term H or Acetyl
  MOD_RES (6)..(6): Tyr or Phospho-Tyr
  MOD_RES (8)..(8): Modified Cys
  See specification as filed for detailed description of substitutions and preferred embodiments
PEEEEYIC

SEQ ID NO: 5525 - protein, 9 aa, Artificial Sequence
  Description of Artificial Sequence: Synthetic peptide
  N-term H or Acetyl
  MOD_RES (5)..(5): Tyr or Phospho-Tyr
  MOD_RES (7)..(7): Modified Cys
  See specification as filed for detailed description of substitutions and preferred embodiments
PEEEYICIV

SEQ ID NO: 5526 - protein, 15 aa, Artificial Sequence
  Description of Artificial Sequence: Synthetic peptide
  N-term H or Acetyl
  MOD_RES (8)..(8): Tyr or Phospho-Tyr
  MOD_RES (10)..(10): Modified Cys
  See specification as filed for detailed description of substitutions and preferred embodiments
PTAENPEYLCLDVPV

SEQ ID NO: 5527 - protein, 15 aa, Artificial Sequence
  Description of Artificial Sequence: Synthetic peptide
  N-term H or Acetyl
  MOD_RES (8)..(8): Tyr or Phospho-Tyr
  MOD_RES (10)..(10): Modified Cys
  See specification as filed for detailed description of substitutions and preferred embodiments
PTGEAPTYVCTQQIP

SEQ ID NO: 5528 - protein, 10 aa, Artificial Sequence
  Description of Artificial Sequence: Synthetic peptide
  N-term H or Acetyl
  MOD_RES (5)..(5): Tyr or Phospho-Tyr
  MOD_RES (7)..(7): Modified Cys
  See specification as filed for detailed description of substitutions and preferred embodiments
PVPEYICQSV

SEQ ID NO: 5529 - protein, 15 aa, Artificial Sequence
  Description of Artificial Sequence: Synthetic peptide
  N-term H or Acetyl
  MOD_RES (8)..(8): Tyr or Phospho-Tyr
  MOD_RES (10)..(10): Modified Cys
  See specification as filed for detailed description of substitutions and preferred embodiments
PVSETDDYACIIDEE

SEQ ID NO: 5530 - protein, 15 aa, Artificial Sequence
  Description of Artificial Sequence: Synthetic peptide
  N-term H or Acetyl
  MOD_RES (8)..(8): Tyr or Phospho-Tyr
  MOD_RES (10)..(10): Modified Cys
  See specification as filed for detailed description of substitutions and preferred embodiments
QALDNPEYHCASNGP

SEQ ID NO: 5531 - protein, 8 aa, Artificial Sequence
  Description of Artificial Sequence: Synthetic peptide
  N-term H or Acetyl
  MOD_RES (6)..(6): Tyr or Phospho-Tyr
  MOD_RES (8)..(8): Modified Cys
  See specification as filed for detailed description of substitutions and preferred embodiments
QEEEEYIC

SEQ ID NO: 5532 - protein, 9 aa, Artificial Sequence
  Description of Artificial Sequence: Synthetic peptide
  N-term H or Acetyl
  MOD_RES (5)..(5): Tyr or Phospho-Tyr
  MOD_RES (7)..(7): Modified Cys
  See specification as filed for detailed description of substitutions and preferred embodiments
QEEEYICIV

SEQ ID NO: 5533 - protein, 15 aa, Artificial Sequence
  Description of Artificial Sequence: Synthetic peptide
  N-term H or Acetyl
  MOD_RES (6)..(6): Modified Cys
  MOD_RES (8)..(8): Tyr or Phospho-Tyr
  See specification as filed for detailed description of substitutions and preferred embodiments
QLAAKCAYLQILSEE

SEQ ID NO: 5534 - protein, 15 aa, Artificial Sequence
  Description of Artificial Sequence: Synthetic peptide
  N-term H or Acetyl
  MOD_RES (8)..(8): Tyr or Phospho-Tyr
  MOD_RES (10)..(10): Modified Cys
  See specification as filed for detailed description of substitutions and preferred embodiments
QLAAKLAYLCILSEE

SEQ ID NO: 5535 - protein, 15 aa, Artificial Sequence
  Description of Artificial Sequence: Synthetic peptide
  N-term H or Acetyl
  MOD_RES (8)..(8): Tyr or Phospho-Tyr
  MOD_RES (10)..(10): Modified Cys
  See specification as filed for detailed description of substitutions and preferred embodiments
QLTFALRYLCFFTKA

SEQ ID NO: 5536 - protein, 15 aa, Artificial Sequence
  Description of Artificial Sequence: Synthetic peptide
  N-term H or Acetyl
  MOD_RES (8)..(8): Tyr or Phospho-Tyr
  MOD_RES (10)..(10): Modified Cys
  See specification as filed for detailed description of substitutions and preferred embodiments
QVSETDDYACIIDEE

SEQ ID NO: 5537 - protein, 12 aa, Artificial Sequence
  Description of Artificial Sequence: Synthetic peptide
  N-term H or Acetyl
  MOD_RES (7)..(7): Tyr or Phospho-Tyr
  MOD_RES (9)..(9): Modified Cys
  See specification as filed for detailed description of substitutions and preferred embodiments
RAEEEEYICLVA

SEQ ID NO: 5538 - protein, 12 aa, Artificial Sequence
  Description of Artificial Sequence: Synthetic peptide
  N-term H or Acetyl
  MOD_RES (7)..(7): Tyr or Phospho-Tyr
  MOD_RES (9)..(9): Modified Cys
  See specification as filed for detailed description of substitutions and preferred embodiments
RAHEEIYFCFWG

SEQ ID NO: 5539 - protein, 12 aa, Artificial Sequence
  Description of Artificial Sequence: Synthetic peptide
  N-term H or Acetyl
  MOD_RES (2)..(2): Modified Cys
  MOD_RES (4)..(4): Tyr or Phospho-Tyr
  MOD_RES (5)..(5): Leu or Nle (i.e. isomer of Leucine)
  See specification as filed for detailed description of substitutions and preferred embodiments
RCDYLTMQIGKK

SEQ ID NO: 5540 - protein, 8 aa, Artificial Sequence
  Description of Artificial Sequence: Synthetic peptide
  N-term H or Acetyl
  MOD_RES (6)..(6): Tyr or Phospho-Tyr
  MOD_RES (8)..(8): Modified Cys
  See specification as filed for detailed description of substitutions and preferred embodiments
REEEEYIC

SEQ ID NO: 5541 - protein, 9 aa, Artificial Sequence
  Description of Artificial Sequence: Synthetic peptide
  N-term H or Acetyl
  MOD_RES (5)..(5): Tyr or Phospho-Tyr
  MOD_RES (7)..(7): Modified Cys
  See specification as filed for detailed description of substitutions and preferred embodiments
REEEYICIV

SEQ ID NO: 5542 - protein, 15 aa, Artificial Sequence
  Description of Artificial Sequence: Synthetic peptide
  N-term H or Acetyl
  MOD_RES (6)..(6): Modified Cys
  MOD_RES (8)..(8): Tyr or Phospho-Tyr
  See specification as filed for detailed description of substitutions and preferred embodiments
RLDGECIYIRHSNLM

SEQ ID NO: 5543 - protein, 15 aa, Artificial Sequence
  Description of Artificial Sequence: Synthetic peptide
  N-term H or Acetyl
  MOD_RES (8)..(8): Tyr or Phospho-Tyr
  MOD_RES (10)..(10): Modified Cys
  See specification as filed for detailed description of substitutions and preferred embodiments
RNEEENIYSCPHDST

SEQ ID NO: 5544 - protein, 15 aa, Artificial Sequence
  Description of Artificial Sequence: Synthetic peptide
  N-term H or Acetyl
  MOD_RES (8)..(8): Tyr or Phospho-Tyr
  MOD_RES (10)..(10): Modified Cys
  See specification as filed for detailed description of substitutions and preferred embodiments
RNEGVATYACAVLFR

SEQ ID NO: 5545 - protein, 15 aa, Artificial Sequence
  Description of Artificial Sequence: Synthetic peptide
  N-term H or Acetyl
  MOD_RES (8)..(8): Tyr or Phospho-Tyr
  MOD_RES (10)..(10): Modified Cys
  See specification as filed for detailed description of substitutions and preferred embodiments
RQGSSDIYSCPEGKL

SEQ ID NO: 5546 - protein, 13 aa, Artificial Sequence
  Description of Artificial Sequence: Synthetic peptide
  N-term H or Acetyl
  MOD_RES (8)..(8): Tyr or Phospho-Tyr
  MOD_RES (10)..(10): Modified Cys
  See specification as filed for detailed description of substitutions and preferred embodiments
RRAEEEEYICLVA

SEQ ID NO: 5547 - protein, 24 aa, Artificial Sequence
  Description of Artificial Sequence: Synthetic peptide
  N-term H or Acetyl
  MOD_RES (4)..(4): Tyr or Phospho-Tyr
  MOD_RES (6)..(6): Modified Cys
  See specification as filed for detailed description of substitutions and preferred embodiments
RRHYYCDTHTNTYYLRTFGHNTRR

SEQ ID NO: 5548 - protein, 24 aa, Artificial Sequence
  Description of Artificial Sequence: Synthetic peptide
  N-term H or Acetyl
  MOD_RES (13)..(13): Tyr or Phospho-Tyr
  MOD_RES (15)..(15): Modified Cys
  See specification as filed for detailed description of substitutions and preferred embodiments
RRHYYYDTHTNTYYCRTFGHNTRR

SEQ ID NO: 5549 - protein, 14 aa, Artificial Sequence
  Description of Artificial Sequence: Synthetic peptide
  N-term H or Acetyl
  MOD_RES (9)..(9): Tyr or Phospho-Tyr
  MOD_RES (11)..(11): Modified Cys
  See specification as filed for detailed description of substitutions and preferred embodiments
RRRAEEEEYICLVA

SEQ ID NO: 5550 - protein, 15 aa, Artificial Sequence
  Description of Artificial Sequence: Synthetic peptide
  N-term H or Acetyl
  MOD_RES (8)..(8): Tyr or Phospho-Tyr
  MOD_RES (10)..(10): Modified Cys
  See specification as filed for detailed description of substitutions and preferred embodiments
RVSETDDYACIIDEE

SEQ ID NO: 5551 - protein, 15 aa, Artificial Sequence
  Description of Artificial Sequence: Synthetic peptide
  N-term H or Acetyl
  MOD_RES (2)..(2): Leu or Nle (i.e. isomer of Leucine)
  MOD_RES (8)..(8): Tyr or Phospho-Tyr
  MOD_RES (10)..(10): Modified Cys
  See specification as filed for detailed description of substitutions and preferred embodiments
SLSETDDYACIIDEE

SEQ ID NO: 5552 - protein, 15 aa, Artificial Sequence
  Description of Artificial Sequence: Synthetic peptide
  N-term H or Acetyl
  MOD_RES (8)..(8): Tyr or Phospho-Tyr
  MOD_RES (10)..(10): Modified Cys
  See specification as filed for detailed description of substitutions and preferred embodiments
SASETDDYACIIDEE

SEQ ID NO: 5553 - protein, 15 aa, Artificial Sequence
  Description of Artificial Sequence: Synthetic peptide
  N-term H or Acetyl
  MOD_RES (8)..(8): Tyr or Phospho-Tyr
  MOD_RES (10)..(10): Modified Cys
  See specification as filed for detailed description of substitutions and preferred embodiments
SDSETDDYACIIDEE

SEQ ID NO: 5554 - protein, 15 aa, Artificial Sequence
  Description of Artificial Sequence: Synthetic peptide
  N-term H or Acetyl
  MOD_RES (8)..(8): Tyr or Phospho-Tyr
  MOD_RES (10)..(10): Modified Cys
  See specification as filed for detailed description of substitutions and preferred embodiments
SEELDENYVCMNPNS

SEQ ID NO: 5555 - protein, 18 aa, Artificial Sequence
  Description of Artificial Sequence: Synthetic peptide
  N-term H or Acetyl
  MOD_RES (7)..(7): Modified Cys
  MOD_RES (9)..(9): Tyr or Phospho-Tyr
  See specification as filed for detailed description of substitutions and preferred embodiments
SEGLSMCNYIGLINRIKK

SEQ ID NO: 5556 - protein, 15 aa, Artificial Sequence
  Description of Artificial Sequence: Synthetic peptide
  N-term H or Acetyl
  MOD_RES (8)..(8): Tyr or Phospho-Tyr
  MOD_RES (10)..(10): Modified Cys
  See specification as filed for detailed description of substitutions and preferred embodiments
SESETDDYACIIDEE

SEQ ID NO: 5557 - protein, 15 aa, Artificial Sequence
  Description of Artificial Sequence: Synthetic peptide
  N-term H or Acetyl
  MOD_RES (8)..(8): Tyr or Phospho-Tyr
  MOD_RES (10)..(10): Modified Cys
  See specification as filed for detailed description of substitutions and preferred embodiments
SFSETDDYACIIDEE

SEQ ID NO: 5558 - protein, 15 aa, Artificial Sequence
  Description of Artificial Sequence: Synthetic peptide
  N-term H or Acetyl
  MOD_RES (8)..(8): Tyr or Phospho-Tyr
  MOD_RES (10)..(10): Modified Cys
  See specification as filed for detailed description of substitutions and preferred embodiments
SGSETDDYACIIDEE

SEQ ID NO: 5559 - protein, 15 aa, Artificial Sequence
  Description of Artificial Sequence: Synthetic peptide
  N-term H or Acetyl
  MOD_RES (8)..(8): Tyr or Phospho-Tyr
  MOD_RES (10)..(10): Modified Cys
  See specification as filed for detailed description of substitutions and preferred embodiments
SHDSEENYVCMNPNL

SEQ ID NO: 5560 - protein, 15 aa, Artificial Sequence
  Description of Artificial Sequence: Synthetic peptide
  N-term H or Acetyl
  MOD_RES (8)..(8): Tyr or Phospho-Tyr
  MOD_RES (10)..(10): Modified Cys
  See specification as filed for detailed description of substitutions and preferred embodiments
SHSETDDYACIIDEE

SEQ ID NO: 5561 - protein, 15 aa, Artificial Sequence
  Description of Artificial Sequence: Synthetic peptide
  N-term H or Acetyl
  MOD_RES (8)..(8): Tyr or Phospho-Tyr
  MOD_RES (10)..(10): Modified Cys
  See specification as filed for detailed description of substitutions and preferred embodiments
SISETDDYACIIDEE

SEQ ID NO: 5562 - protein, 15 aa, Artificial Sequence
  Description of Artificial Sequence: Synthetic peptide
  N-term H or Acetyl
  MOD_RES (8)..(8): Tyr or Phospho-Tyr
  MOD_RES (10)..(10): Modified Cys
  See specification as filed for detailed description of substitutions and preferred embodiments
SKSETDDYACIIDEE

SEQ ID NO: 5563 - protein, 15 aa, Artificial Sequence
  Description of Artificial Sequence: Synthetic peptide
  N-term H or Acetyl
  MOD_RES (8)..(8): Tyr or Phospho-Tyr
  MOD_RES (10)..(10): Modified Cys
  See specification as filed for detailed description of substitutions and preferred embodiments
SLSETDDYACIIDEE

SEQ ID NO: 5564 - protein, 15 aa, Artificial Sequence
  Description of Artificial Sequence: Synthetic peptide
  N-term H or Acetyl
  MOD_RES (8)..(8): Tyr or Phospho-Tyr
  MOD_RES (10)..(10): Modified Cys
  See specification as filed for detailed description of substitutions and preferred embodiments
SNSETDDYACIIDEE

SEQ ID NO: 5565 - protein, 15 aa, Artificial Sequence
  Description of Artificial Sequence: Synthetic peptide
  N-term H or Acetyl
  MOD_RES (6)..(6): Modified Cys
  MOD_RES (8)..(8): Tyr or Phospho-Tyr
  MOD_RES (9)..(9): Tyr or Phospho-Tyr
  See specification as filed for detailed description of substitutions and preferred embodiments
SPAFDCLYYWDQDPP

SEQ ID NO: 5566 - protein, 15 aa, Artificial Sequence
  Description of Artificial Sequence: Synthetic peptide
  N-term H or Acetyl
  MOD_RES (6)..(6): Modified Cys
  MOD_RES (8)..(8): Tyr or Phospho-Tyr
  See specification as filed for detailed description of substitutions and preferred embodiments
SPAFDCLYYWDQDPP

SEQ ID NO: 5567 - protein, 12 aa, Artificial Sequence
  Description of Artificial Sequence: Synthetic peptide
  N-term H or Acetyl
  MOD_RES (7)..(7): Tyr or Phospho-Tyr
  MOD_RES (9)..(9): Modified Cys
  See specification as filed for detailed description of substitutions and preferred embodiments
SPATDLYQCPPG

SEQ ID NO: 5568 - protein, 13 aa, Artificial Sequence
  Description of Artificial Sequence: Synthetic peptide
  N-term H or Acetyl
  MOD_RES (6)..(6): Tyr or Phospho-Tyr
  MOD_RES (8)..(8): Modified Cys
  See specification as filed for detailed description of substitutions and preferred embodiments
SPQPEYVCQPDVR

SEQ ID NO: 5569 - protein, 15 aa, Artificial Sequence
  Description of Artificial Sequence: Synthetic peptide
  N-term H or Acetyl
  MOD_RES (8)..(8): Tyr or Phospho-Tyr
  MOD_RES (10)..(10): Modified Cys
  See specification as filed for detailed description of substitutions and preferred embodiments
SPSETDDYACIIDEE

SEQ ID NO: 5570 - protein, 15 aa, Artificial Sequence
  Description of Artificial Sequence: Synthetic peptide
  N-term H or Acetyl
  MOD_RES (8)..(8): Tyr or Phospho-Tyr
  MOD_RES (10)..(10): Modified Cys
  See specification as filed for detailed description of substitutions and preferred embodiments
SQSETDDYACIIDEE

SEQ ID NO: 5571 - protein, 15 aa, Artificial Sequence
  Description of Artificial Sequence: Synthetic peptide
  N-term H or Acetyl
  MOD_RES (8)..(8): Tyr or Phospho-Tyr
  MOD_RES (10)..(10): Modified Cys
  See specification as filed for detailed description of substitutions and preferred embodiments
SRSETDDYACIIDEE

SEQ ID NO: 5572 - protein, 15 aa, Artificial Sequence
  Description of Artificial Sequence: Synthetic peptide
  N-term H or Acetyl
  MOD_RES (8)..(8): Tyr or Phospho-Tyr
  MOD_RES (10)..(10): Modified Cys
  See specification as filed for detailed description of substitutions and preferred embodiments
SSEPVGIYQCFEKKT

SEQ ID NO: 5573 - protein, 10 aa, Artificial Sequence
  Description of Artificial Sequence: Synthetic peptide
  N-term H or Acetyl
  MOD_RES (6)..(6): Modified Cys
  MOD_RES (8)..(8): Tyr or Phospho-Tyr
  See specification as filed for detailed description of substitutions and preferred embodiments
SSHKGCHYKH

SEQ ID NO: 5574 - protein, 11 aa, Artificial Sequence
  Description of Artificial Sequence: Synthetic peptide
  N-term H or Acetyl
  MOD_RES (8)..(8): Tyr or Phospho-Tyr
  MOD_RES (10)..(10): Modified Cys
  See specification as filed for detailed description of substitutions and preferred embodiments
SSHKGFHYKCG

SEQ ID NO: 5575 - protein, 15 aa, Artificial Sequence
  Description of Artificial Sequence: Synthetic peptide
  N-term H or Acetyl
  MOD_RES (6)..(6): Modified Cys
  MOD_RES (8)..(8): Tyr or Phospho-Tyr
  See specification as filed for detailed description of substitutions and preferred embodiments
SSTDRCPYEKVSAGN

SEQ ID NO: 5576 - protein, 15 aa, Artificial Sequence
  Description of Artificial Sequence: Synthetic peptide
  N-term H or Acetyl
  MOD_RES (8)..(8): Tyr or Phospho-Tyr
  MOD_RES (10)..(10): Modified Cys
  See specification as filed for detailed description of substitutions and preferred embodiments
STAENAEYLCVAPQS

SEQ ID NO: 5577 - protein, 15 aa, Artificial Sequence
  Description of Artificial Sequence: Synthetic peptide
  N-term H or Acetyl
  MOD_RES (6)..(6): Modified Cys
  MOD_RES (8)..(8): Tyr or Phospho-Tyr
  See specification as filed for detailed description of substitutions and preferred embodiments
STAENCEYLRVAPQS

SEQ ID NO: 5578 - protein, 15 aa, Artificial Sequence
  Description of Artificial Sequence: Synthetic peptide
  N-term H or Acetyl
  MOD_RES (3)..(3): Leu or Nle (i.e. isomer of Leucine)
  MOD_RES (8)..(8): Tyr or Phospho-Tyr
  MOD_RES (10)..(10): Modified Cys
  See specification as filed for detailed description of substitutions and preferred embodiments
SVLETDDYACIIDEE

SEQ ID NO: 5579 - protein, 15 aa, Artificial Sequence
  Description of Artificial Sequence: Synthetic peptide
  N-term H or Acetyl
  MOD_RES (8)..(8): Tyr or Phospho-Tyr
  MOD_RES (10)..(10): Modified Cys
  See specification as filed for detailed description of substitutions and preferred embodiments
SVAETDDYACIIDEE

SEQ ID NO: 5580 - protein, 15 aa, Artificial Sequence
  Description of Artificial Sequence: Synthetic peptide
  N-term H or Acetyl
  MOD_RES (8)..(8): Tyr or Phospho-Tyr
  MOD_RES (10)..(10): Modified Cys
  See specification as filed for detailed description of substitutions and preferred embodiments
SVDETDDYACIIDEE

SEQ ID NO: 5581 - protein, 15 aa, Artificial Sequence
  Description of Artificial Sequence: Synthetic peptide
  N-term H or Acetyl
  MOD_RES (8)..(8): Tyr or Phospho-Tyr
  MOD_RES (10)..(10): Modified Cys
  See specification as filed for detailed description of substitutions and preferred embodiments
SVEETDDYACIIDEE

SEQ ID NO: 5582 - protein, 15 aa, Artificial Sequence
  Description of Artificial Sequence: Synthetic peptide
  N-term H or Acetyl
  MOD_RES (8)..(8): Tyr or Phospho-Tyr
  MOD_RES (10)..(10): Modified Cys
  See specification as filed for detailed description of substitutions and preferred embodiments
SVFETDDYACIIDEE

SEQ ID NO: 5583 - protein, 15 aa, Artificial Sequence
  Description of Artificial Sequence: Synthetic peptide
  N-term H or Acetyl
  MOD_RES (8)..(8): Tyr or Phospho-Tyr
  MOD_RES (10)..(10): Modified Cys
  See specification as filed for detailed description of substitutions and preferred embodiments
SVGETDDYACIIDEE

SEQ ID NO: 5584 - protein, 15 aa, Artificial Sequence
  Description of Artificial Sequence: Synthetic peptide
  N-term H or Acetyl
  MOD_RES (8)..(8): Tyr or Phospho-Tyr
  MOD_RES (10)..(10): Modified Cys
  See specification as filed for detailed description of substitutions and preferred embodiments
SVHETDDYACIIDEE

SEQ ID NO: 5585 - protein, 15 aa, Artificial Sequence
  Description of Artificial Sequence: Synthetic peptide
  N-term H or Acetyl
  MOD_RES (8)..(8): Tyr or Phospho-Tyr
  MOD_RES (10)..(10): Modified Cys
  See specification as filed for detailed description of substitutions and preferred embodiments
SVIETDDYACIIDEE

SEQ ID NO: 5586 - protein, 15 aa, Artificial Sequence
  Description of Artificial Sequence: Synthetic peptide
  N-term H or Acetyl
  MOD_RES (8)..(8): Tyr or Phospho-Tyr
  MOD_RES (10)..(10): Modified Cys
  See specification as filed for detailed description of substitutions and preferred embodiments
SVKETDDYACIIDEE

SEQ ID NO: 5587 - protein, 15 aa, Artificial Sequence
  Description of Artificial Sequence: Synthetic peptide
  N-term H or Acetyl
  MOD_RES (8)..(8): Tyr or Phospho-Tyr
  MOD_RES (10)..(10): Modified Cys
  See specification as filed for detailed description of substitutions and preferred embodiments
SVLETDDYACIIDEE

SEQ ID NO: 5588 - protein, 15 aa, Artificial Sequence
  Description of Artificial Sequence: Synthetic peptide
  N-term H or Acetyl
  MOD_RES (8)..(8): Tyr or Phospho-Tyr
  MOD_RES (10)..(10): Modified Cys
  See specification as filed for detailed description of substitutions and preferred embodiments
SVNETDDYACIIDEE

SEQ ID NO: 5589 - protein, 15 aa, Artificial Sequence
  Description of Artificial Sequence: Synthetic peptide
  N-term H or Acetyl
  MOD_RES (8)..(8): Tyr or Phospho-Tyr
  MOD_RES (10)..(10): Modified Cys
  See specification as filed for detailed description of substitutions and preferred embodiments
SVPETDDYACIIDEE

SEQ ID NO: 5590 - protein, 15 aa, Artificial Sequence
  Description of Artificial Sequence: Synthetic peptide
  N-term H or Acetyl
  MOD_RES (8)..(8): Tyr or Phospho-Tyr
  MOD_RES (10)..(10): Modified Cys
  See specification as filed for detailed description of substitutions and preferred embodiments
SVQETDDYACIIDEE

SEQ ID NO: 5591 - protein, 15 aa, Artificial Sequence
  Description of Artificial Sequence: Synthetic peptide
  N-term H or Acetyl
  MOD_RES (8)..(8): Tyr or Phospho-Tyr
  MOD_RES (10)..(10): Modified Cys
  See specification as filed for detailed description of substitutions and preferred embodiments
SVRETDDYACIIDEE

SEQ ID NO: 5592 - protein, 15 aa, Artificial Sequence
  Description of Artificial Sequence: Synthetic peptide
  N-term H or Acetyl
  MOD_RES (4)..(4): Leu or Nle (i.e. isomer of Leucine)
  MOD_RES (8)..(8): Tyr or Phospho-Tyr
  MOD_RES (10)..(10): Modified Cys
  See specification as filed for detailed description of substitutions and preferred embodiments
SVSLTDDYACIIDEE

SEQ ID NO: 5593 - protein, 15 aa, Artificial Sequence
  Description of Artificial Sequence: Synthetic peptide
  N-term H or Acetyl
  MOD_RES (8)..(8): Tyr or Phospho-Tyr
  MOD_RES (10)..(10): Modified Cys
  See specification as filed for detailed description of substitutions and preferred embodiments
SVSATDDYACIIDEE

SEQ ID NO: 5594 - protein, 15 aa, Artificial Sequence
  Description of Artificial Sequence: Synthetic peptide
  N-term H or Acetyl
  MOD_RES (8)..(8): Tyr or Phospho-Tyr
  MOD_RES (10)..(10): Modified Cys
  See specification as filed for detailed description of substitutions and preferred embodiments
SVSDTDDYACIIDEE

SEQ ID NO: 5595 - protein, 15 aa, Artificial Sequence
  Description of Artificial Sequence: Synthetic peptide
  N-term H or Acetyl
  MOD_RES (5)..(5): Leu or Nle (i.e. isomer of Leucine)
  MOD_RES (8)..(8): Tyr or Phospho-Tyr
  MOD_RES (10)..(10): Modified Cys
  See specification as filed for detailed description of substitutions and preferred embodiments
SVSELDDYACIIDEE

SEQ ID NO: 5596 - protein, 15 aa, Artificial Sequence
  Description of Artificial Sequence: Synthetic peptide
  N-term H or Acetyl
  MOD_RES (8)..(8): Tyr or Phospho-Tyr
  MOD_RES (10)..(10): Modified Cys
  See specification as filed for detailed description of substitutions and preferred embodiments
SVSEADDYACIIDEE

SEQ ID NO: 5597 - protein, 15 aa, Artificial Sequence
  Description of Artificial Sequence: Synthetic peptide
  N-term H or Acetyl
  MOD_RES (8)..(8): Tyr or Phospho-Tyr
  MOD_RES (10)..(10): Modified Cys
  See specification as filed for detailed description of substitutions and preferred embodiments
SVSEDDDYACIIDEE

SEQ ID NO: 5598 - protein, 15 aa, Artificial Sequence
  Description of Artificial Sequence: Synthetic peptide
  N-term H or Acetyl
  MOD_RES (8)..(8): Tyr or Phospho-Tyr
  MOD_RES (10)..(10): Modified Cys
  See specification as filed for detailed description of substitutions and preferred embodiments
SVSEEDDYACIIDEE

SEQ ID NO: 5599 - protein, 15 aa, Artificial Sequence
  Description of Artificial Sequence: Synthetic peptide
  N-term H or Acetyl
  MOD_RES (8)..(8): Tyr or Phospho-Tyr
  MOD_RES (10)..(10): Modified Cys
  See specification as filed for detailed description of substitutions and preferred embodiments
SVSEFDDYACIIDEE

SEQ ID NO: 5600 - protein, 15 aa, Artificial Sequence
  Description of Artificial Sequence: Synthetic peptide
  N-term H or Acetyl
  MOD_RES (8)..(8): Tyr or Phospho-Tyr
  MOD_RES (10)..(10): Modified Cys
  See specification as filed for detailed description of substitutions and preferred embodiments
SVSEGDDYACIIDEE

SEQ ID NO: 5601 - protein, 15 aa, Artificial Sequence
  Description of Artificial Sequence: Synthetic peptide
  N-term H or Acetyl
  MOD_RES (8)..(8): Tyr or Phospho-Tyr
  MOD_RES (10)..(10): Modified Cys
  See specification as filed for detailed description of substitutions and preferred embodiments
SVSEHDDYACIIDEE

SEQ ID NO: 5602 - protein, 15 aa, Artificial Sequence
  Description of Artificial Sequence: Synthetic peptide
  N-term H or Acetyl
  MOD_RES (8)..(8): Tyr or Phospho-Tyr
  MOD_RES (10)..(10): Modified Cys
  See specification as filed for detailed description of substitutions and preferred embodiments
SVSEIDDYACIIDEE

SEQ ID NO: 5603 - protein, 15 aa, Artificial Sequence
  Description of Artificial Sequence: Synthetic peptide
  N-term H or Acetyl
  MOD_RES (8)..(8): Tyr or Phospho-Tyr
  MOD_RES (10)..(10): Modified Cys
  See specification as filed for detailed description of substitutions and preferred embodiments
SVSEKDDYACIIDEE

SEQ ID NO: 5604 - protein, 15 aa, Artificial Sequence
  Description of Artificial Sequence: Synthetic peptide
  N-term H or Acetyl
  MOD_RES (8)..(8): Tyr or Phospho-Tyr
  MOD_RES (10)..(10): Modified Cys
  See specification as filed for detailed description of substitutions and preferred embodiments
SVSELDDYACIIDEE

SEQ ID NO: 5605 - protein, 15 aa, Artificial Sequence
  Description of Artificial Sequence: Synthetic peptide
  N-term H or Acetyl
  MOD_RES (8)..(8): Tyr or Phospho-Tyr
  MOD_RES (10)..(10): Modified Cys
  See specification as filed for detailed description of substitutions and preferred embodiments
SVSENDDYACIIDEE

SEQ ID NO: 5606 - protein, 15 aa, Artificial Sequence
  Description of Artificial Sequence: Synthetic peptide
  N-term H or Acetyl
  MOD_RES (8)..(8): Tyr or Phospho-Tyr
  MOD_RES (10)..(10): Modified Cys
  See specification as filed for detailed description of substitutions and preferred embodiments
SVSEPDDYACIIDEE

SEQ ID NO: 5607 - protein, 15 aa, Artificial Sequence
  Description of Artificial Sequence: Synthetic peptide
  N-term H or Acetyl
  MOD_RES (8)..(8): Tyr or Phospho-Tyr
  MOD_RES (10)..(10): Modified Cys
  See specification as filed for detailed description of substitutions and preferred embodiments
SVSEQDDYACIIDEE

SEQ ID NO: 5608 - protein, 15 aa, Artificial Sequence
  Description of Artificial Sequence: Synthetic peptide
  N-term H or Acetyl
  MOD_RES (8)..(8): Tyr or Phospho-Tyr
  MOD_RES (10)..(10): Modified Cys
  See specification as filed for detailed description of substitutions and preferred embodiments
SVSERDDYACIIDEE

SEQ ID NO: 5609 - protein, 15 aa, Artificial Sequence
  Description of Artificial Sequence: Synthetic peptide
  N-term H or Acetyl
  MOD_RES (6)..(6): Leu or Nle (i.e. isomer of Leucine)
  MOD_RES (8)..(8): Tyr or Phospho-Tyr
  MOD_RES (10)..(10): Modified Cys
  See specification as filed for detailed description of substitutions and preferred embodiments
SVSETLDYACIIDEE

SEQ ID NO: 5610 - protein, 15 aa, Artificial Sequence
  Description of Artificial Sequence: Synthetic peptide
  N-term H or Acetyl
  MOD_RES (8)..(8): Tyr or Phospho-Tyr
  MOD_RES (10)..(10): Modified Cys
  See specification as filed for detailed description of substitutions and preferred embodiments
SVSETADYACIIDEE

SEQ ID NO: 5611 - protein, 15 aa, Artificial Sequence
  Description of Artificial Sequence: Synthetic peptide
  N-term H or Acetyl
  MOD_RES (7)..(7): Leu or Nle (i.e. isomer of Leucine)
  MOD_RES (8)..(8): Tyr or Phospho-Tyr
  MOD_RES (10)..(10): Modified Cys
  See specification as filed for detailed description of substitutions and preferred embodiments
SVSETDLYACIIDEE

SEQ ID NO: 5612 - protein, 15 aa, Artificial Sequence
  Description of Artificial Sequence: Synthetic peptide
  N-term H or Acetyl
  MOD_RES (8)..(8): Tyr or Phospho-Tyr
  MOD_RES (10)..(10): Modified Cys
  See specification as filed for detailed description of substitutions and preferred embodiments
SVSETDAYACIIDEE

SEQ ID NO: 5613 - protein, 15 aa, Artificial Sequence
  Description of Artificial Sequence: Synthetic peptide
  N-term H or Acetyl
  MOD_RES (8)..(8): Tyr or Phospho-Tyr
  MOD_RES (9)..(9): Leu or Nle (i.e. isomer of Leucine)
  MOD_RES (10)..(10): Modified Cys
  See specification as filed for detailed description of substitutions and preferred embodiments
SVSETDDYLCIIDEE

SEQ ID NO: 5614 - protein, 15 aa, Artificial Sequence
  Description of Artificial Sequence: Synthetic peptide
  N-term H or Acetyl
  MOD_RES (8)..(8): Tyr or Phospho-Tyr
  MOD_RES (10)..(10): Modified Cys
  MOD_RES (11)..(11): Leu or Nle (i.e. isomer of Leucine)
  See specification as filed for detailed description of substitutions and preferred embodiments
SVSETDDYACLIDEE

SEQ ID NO: 5615 - protein, 15 aa, Artificial Sequence
  Description of Artificial Sequence: Synthetic peptide
  N-term H or Acetyl
  MOD_RES (8)..(8): Tyr or Phospho-Tyr
  MOD_RES (10)..(10): Modified Cys
  See specification as filed for detailed description of substitutions and preferred embodiments
SVSETDDYACAIDEE

SEQ ID NO: 5616 - protein, 15 aa, Artificial Sequence
  Description of Artificial Sequence: Synthetic peptide
  N-term H or Acetyl
  MOD_RES (8)..(8): Tyr or Phospho-Tyr
  MOD_RES (10)..(10): Modified Cys
  See specification as filed for detailed description of substitutions and preferred embodiments
SVSETDDYACDIDEE

SEQ ID NO: 5617 - protein, 15 aa, Artificial Sequence
  Description of Artificial Sequence: Synthetic peptide
  N-term H or Acetyl
  MOD_RES (8)..(8): Tyr or Phospho-Tyr
  MOD_RES (10)..(10): Modified Cys
  See specification as filed for detailed description of substitutions and preferred embodiments
SVSETDDYACEIDEE

SEQ ID NO: 5618 - protein, 15 aa, Artificial Sequence
  Description of Artificial Sequence: Synthetic peptide
  N-term H or Acetyl
  MOD_RES (8)..(8): Tyr or Phospho-Tyr
  MOD_RES (10)..(10): Modified Cys
  See specification as filed for detailed description of substitutions and preferred embodiments
SVSETDDYACFIDEE

SEQ ID NO: 5619 - protein, 15 aa, Artificial Sequence
  Description of Artificial Sequence: Synthetic peptide
  N-term H or Acetyl
  MOD_RES (8)..(8): Tyr or Phospho-Tyr
  MOD_RES (10)..(10): Modified Cys
  See specification as filed for detailed description of substitutions and preferred embodiments
SVSETDDYACGIDEE

SEQ ID NO: 5620 - protein, 15 aa, Artificial Sequence
  Description of Artificial Sequence: Synthetic peptide
  N-term H or Acetyl
  MOD_RES (8)..(8): Tyr or Phospho-Tyr
  MOD_RES (10)..(10): Modified Cys
  See specification as filed for detailed description of substitutions and preferred embodiments
SVSETDDYACHIDEE

SEQ ID NO: 5621 - protein, 15 aa, Artificial Sequence
  Description of Artificial Sequence: Synthetic peptide
  N-term H or Acetyl
  MOD_RES (8)..(8): Tyr or Phospho-Tyr
  MOD_RES (10)..(10): Modified Cys
  MOD_RES (12)..(12): Leu or Nle (i.e. isomer of Leucine)
  See specification as filed for detailed description of substitutions and preferred embodiments
SVSETDDYACILDEE

SEQ ID NO: 5622 - protein, 15 aa, Artificial Sequence
  Description of Artificial Sequence: Synthetic peptide
  N-term H or Acetyl
  MOD_RES (8)..(8): Tyr or Phospho-Tyr
  MOD_RES (10)..(10): Modified Cys
  See specification as filed for detailed description of substitutions and preferred embodiments
SVSETDDYACIADEE

SEQ ID NO: 5623 - protein, 15 aa, Artificial Sequence
  Description of Artificial Sequence: Synthetic peptide
  N-term H or Acetyl
  MOD_RES (8)..(8): Tyr or Phospho-Tyr
  MOD_RES (10)..(10): Modified Cys
  See specification as filed for detailed description of substitutions and preferred embodiments
SVSETDDYACIDDEE

SEQ ID NO: 5624 - protein, 15 aa, Artificial Sequence
  Description of Artificial Sequence: Synthetic peptide
  N-term H or Acetyl
  MOD_RES (8)..(8): Tyr or Phospho-Tyr
  MOD_RES (10)..(10): Modified Cys
  See specification as filed for detailed description of substitutions and preferred embodiments
SVSETDDYACIEDEE

SEQ ID NO: 5625 - protein, 15 aa, Artificial Sequence
  Description of Artificial Sequence: Synthetic peptide
  N-term H or Acetyl
  MOD_RES (8)..(8): Tyr or Phospho-Tyr
  MOD_RES (10)..(10): Modified Cys
  See specification as filed for detailed description of substitutions and preferred embodiments
SVSETDDYACIFDEE

SEQ ID NO: 5626 - protein, 15 aa, Artificial Sequence
  Description of Artificial Sequence: Synthetic peptide
  N-term H or Acetyl
  MOD_RES (8)..(8): Tyr or Phospho-Tyr
  MOD_RES (10)..(10): Modified Cys
  See specification as filed for detailed description of substitutions and preferred embodiments
SVSETDDYACIGDEE

SEQ ID NO: 5627 - protein, 15 aa, Artificial Sequence
  Description of Artificial Sequence: Synthetic peptide
  N-term H or Acetyl
  MOD_RES (8)..(8): Tyr or Phospho-Tyr
  MOD_RES (10)..(10): Modified Cys
  See specification as filed for detailed description of substitutions and preferred embodiments
SVSETDDYACIHDEE

SEQ ID NO: 5628 - protein, 15 aa, Artificial Sequence
  Description of Artificial Sequence: Synthetic peptide
  N-term H or Acetyl
  MOD_RES (8)..(8): Tyr or Phospho-Tyr
  MOD_RES (10)..(10): Modified Cys
  MOD_RES (13)..(13): Leu or Nle (i.e. isomer of Leucine)
  See specification as filed for detailed description of substitutions and preferred embodiments
SVSETDDYACIILEE

SEQ ID NO: 5629 - protein, 15 aa, Artificial Sequence
  Description of Artificial Sequence: Synthetic peptide
  N-term H or Acetyl
  MOD_RES (8)..(8): Tyr or Phospho-Tyr
  MOD_RES (10)..(10): Modified Cys
  See specification as filed for detailed description of substitutions and preferred embodiments
SVSETDDYACIIAEE

SEQ ID NO: 5630 - protein, 15 aa, Artificial Sequence
  Description of Artificial Sequence: Synthetic peptide
  N-term H or Acetyl
  MOD_RES (8)..(8): Tyr or Phospho-Tyr
  MOD_RES (10)..(10): Modified Cys
  MOD_RES (14)..(14): Leu or Nle (i.e. isomer of Leucine)
  See specification as filed for detailed description of substitutions and preferred embodiments
SVSETDDYACIIDLE

SEQ ID NO: 5631 - protein, 15 aa, Artificial Sequence
  Description of Artificial Sequence: Synthetic peptide
  N-term H or Acetyl
  MOD_RES (8)..(8): Tyr or Phospho-Tyr
  MOD_RES (10)..(10): Modified Cys
  See specification as filed for detailed description of substitutions and preferred embodiments
SVSETDDYACIIDAE

SEQ ID NO: 5632 - protein, 15 aa, Artificial Sequence
  Description of Artificial Sequence: Synthetic peptide
  N-term H or Acetyl
  MOD_RES (8)..(8): Tyr or Phospho-Tyr
  MOD_RES (10)..(10): Modified Cys
  See specification as filed for detailed description of substitutions and preferred embodiments
SVSETDDYACIIDDE

SEQ ID NO: 5633 - protein, 15 aa, Artificial Sequence
  Description of Artificial Sequence: Synthetic peptide
  N-term H or Acetyl
  MOD_RES (8)..(8): Tyr or Phospho-Tyr
  MOD_RES (10)..(10): Modified Cys
  MOD_RES (15)..(15): Leu or Nle (i.e. isomer of Leucine)
  See specification as filed for detailed description of substitutions and preferred embodiments
SVSETDDYACIIDEL

SEQ ID NO: 5634 - protein, 15 aa, Artificial Sequence
  Description of Artificial Sequence: Synthetic peptide
  N-term H or Acetyl
  MOD_RES (8)..(8): Tyr or Phospho-Tyr
  MOD_RES (10)..(10): Modified Cys
  See specification as filed for detailed description of substitutions and preferred embodiments
SVSETDDYACIIDEA

SEQ ID NO: 5635 - protein, 15 aa, Artificial Sequence
  Description of Artificial Sequence: Synthetic peptide
  N-term H or Acetyl
  MOD_RES (8)..(8): Tyr or Phospho-Tyr
  MOD_RES (10)..(10): Modified Cys
  See specification as filed for detailed description of substitutions and preferred embodiments
SVSETDDYACIIDED

SEQ ID NO: 5636 - protein, 15 aa, Artificial Sequence
  Description of Artificial Sequence: Synthetic peptide
  N-term H or Acetyl
  MOD_RES (8)..(8): Tyr or Phospho-Tyr
  MOD_RES (10)..(10): Modified Cys
  See specification as filed for detailed description of substitutions and preferred embodiments
SVSETDDYACIIDEF

SEQ ID NO: 5637 - protein, 15 aa, Artificial Sequence
  Description of Artificial Sequence: Synthetic peptide
  N-term H or Acetyl
  MOD_RES (8)..(8): Tyr or Phospho-Tyr
  MOD_RES (10)..(10): Modified Cys
  See specification as filed for detailed description of substitutions and preferred embodiments
SVSETDDYACIIDEG

SEQ ID NO: 5638 - protein, 15 aa, Artificial Sequence
  Description of Artificial Sequence: Synthetic peptide
  N-term H or Acetyl
  MOD_RES (8)..(8): Tyr or Phospho-Tyr
  MOD_RES (10)..(10): Modified Cys
  See specification as filed for detailed description of substitutions and preferred embodiments
SVSETDDYACIIDEH

SEQ ID NO: 5639 - protein, 15 aa, Artificial Sequence
  Description of Artificial Sequence: Synthetic peptide
  N-term H or Acetyl
  MOD_RES (8)..(8): Tyr or Phospho-Tyr
  MOD_RES (10)..(10): Modified Cys
  See specification as filed for detailed description of substitutions and preferred embodiments
SVSETDDYACIIDEI

SEQ ID NO: 5640 - protein, 15 aa, Artificial Sequence
  Description of Artificial Sequence: Synthetic peptide
  N-term H or Acetyl
  MOD_RES (8)..(8): Tyr or Phospho-Tyr
  MOD_RES (10)..(10): Modified Cys
  See specification as filed for detailed description of substitutions and preferred embodiments
SVSETDDYACIIDEK

SEQ ID NO: 5641 - protein, 15 aa, Artificial Sequence
  Description of Artificial Sequence: Synthetic peptide
  N-term H or Acetyl
  MOD_RES (8)..(8): Tyr or Phospho-Tyr
  MOD_RES (10)..(10): Modified Cys
  See specification as filed for detailed description of substitutions and preferred embodiments
SVSETDDYACIIDEL

SEQ ID NO: 5642 - protein, 15 aa, Artificial Sequence
  Description of Artificial Sequence: Synthetic peptide
  N-term H or Acetyl
  MOD_RES (8)..(8): Tyr or Phospho-Tyr
  MOD_RES (10)..(10): Modified Cys
  See specification as filed for detailed description of substitutions and preferred embodiments
SVSETDDYACIIDEN

SEQ ID NO: 5643 - protein, 15 aa, Artificial Sequence
  Description of Artificial Sequence: Synthetic peptide
  N-term H or Acetyl
  MOD_RES (8)..(8): Tyr or Phospho-Tyr
  MOD_RES (10)..(10): Modified Cys
  See specification as filed for detailed description of substitutions and preferred embodiments
SVSETDDYACIIDEP

SEQ ID NO: 5644 - protein, 15 aa, Artificial Sequence
  Description of Artificial Sequence: Synthetic peptide
  N-term H or Acetyl
  MOD_RES (8)..(8): Tyr or Phospho-Tyr
  MOD_RES (10)..(10): Modified Cys
  See specification as filed for detailed description of substitutions and preferred embodiments
SVSETDDYACIIDEQ

SEQ ID NO: 5645 - protein, 15 aa, Artificial Sequence
  Description of Artificial Sequence: Synthetic peptide
  N-term H or Acetyl
  MOD_RES (8)..(8): Tyr or Phospho-Tyr
  MOD_RES (10)..(10): Modified Cys
  See specification as filed for detailed description of substitutions and preferred embodiments
SVSETDDYACIIDER

SEQ ID NO: 5646 - protein, 15 aa, Artificial Sequence
  Description of Artificial Sequence: Synthetic peptide
  N-term H or Acetyl
  MOD_RES (8)..(8): Tyr or Phospho-Tyr
  MOD_RES (10)..(10): Modified Cys
  See specification as filed for detailed description of substitutions and preferred embodiments
SVSETDDYACIIDEV

SEQ ID NO: 5647 - protein, 15 aa, Artificial Sequence
  Description of Artificial Sequence: Synthetic peptide
  N-term H or Acetyl
  MOD_RES (8)..(8): Tyr or Phospho-Tyr
  MOD_RES (10)..(10): Modified Cys
  See specification as filed for detailed description of substitutions and preferred embodiments
SVSETDDYACIIDEW

SEQ ID NO: 5648 - protein, 15 aa, Artificial Sequence
  Description of Artificial Sequence: Synthetic peptide
  N-term H or Acetyl
  MOD_RES (8)..(8): Tyr or Phospho-Tyr
  MOD_RES (10)..(10): Modified Cys
  See specification as filed for detailed description of substitutions and preferred embodiments
SVSETDDYACIIDFE

SEQ ID NO: 5649 - protein, 15 aa, Artificial Sequence
  Description of Artificial Sequence: Synthetic peptide
  N-term H or Acetyl
  MOD_RES (8)..(8): Tyr or Phospho-Tyr
  MOD_RES (10)..(10): Modified Cys
  See specification as filed for detailed description of substitutions and preferred embodiments
SVSETDDYACIIDGE

SEQ ID NO: 5650 - protein, 15 aa, Artificial Sequence
  Description of Artificial Sequence: Synthetic peptide
  N-term H or Acetyl
  MOD_RES (8)..(8): Tyr or Phospho-Tyr
  MOD_RES (10)..(10): Modified Cys
  See specification as filed for detailed description of substitutions and preferred embodiments
SVSETDDYACIIDHE

SEQ ID NO: 5651 - protein, 15 aa, Artificial Sequence
  Description of Artificial Sequence: Synthetic peptide
  N-term H or Acetyl
  MOD_RES (8)..(8): Tyr or Phospho-Tyr
  MOD_RES (10)..(10): Modified Cys
  See specification as filed for detailed description of substitutions and preferred embodiments
SVSETDDYACIIDIE

SEQ ID NO: 5652 - protein, 15 aa, Artificial Sequence
  Description of Artificial Sequence: Synthetic peptide
  N-term H or Acetyl
  MOD_RES (8)..(8): Tyr or Phospho-Tyr
  MOD_RES (10)..(10): Modified Cys
  See specification as filed for detailed description of substitutions and preferred embodiments
SVSETDDYACIIDKE

SEQ ID NO: 5653 - protein, 15 aa, Artificial Sequence
  Description of Artificial Sequence: Synthetic peptide
  N-term H or Acetyl
  MOD_RES (8)..(8): Tyr or Phospho-Tyr
  MOD_RES (10)..(10): Modified Cys
  See specification as filed for detailed description of substitutions and preferred embodiments
SVSETDDYACIIDLE

SEQ ID NO: 5654 - protein, 15 aa, Artificial Sequence
  Description of Artificial Sequence: Synthetic peptide
  N-term H or Acetyl
  MOD_RES (8)..(8): Tyr or Phospho-Tyr
  MOD_RES (10)..(10): Modified Cys
  See specification as filed for detailed description of substitutions and preferred embodiments
SVSETDDYACIIDNE

SEQ ID NO: 5655 - protein, 15 aa, Artificial Sequence
  Description of Artificial Sequence: Synthetic peptide
  N-term H or Acetyl
  MOD_RES (8)..(8): Tyr or Phospho-Tyr
  MOD_RES (10)..(10): Modified Cys
  See specification as filed for detailed description of substitutions and preferred embodiments
SVSETDDYACIIDPE

SEQ ID NO: 5656 - protein, 15 aa, Artificial Sequence
  Description of Artificial Sequence: Synthetic peptide
  N-term H or Acetyl
  MOD_RES (8)..(8): Tyr or Phospho-Tyr
  MOD_RES (10)..(10): Modified Cys
  See specification as filed for detailed description of substitutions and preferred embodiments
SVSETDDYACIIDQE

SEQ ID NO: 5657 - protein, 15 aa, Artificial Sequence
  Description of Artificial Sequence: Synthetic peptide
  N-term H or Acetyl
  MOD_RES (8)..(8): Tyr or Phospho-Tyr
  MOD_RES (10)..(10): Modified Cys
  See specification as filed for detailed description of substitutions and preferred embodiments
SVSETDDYACIIDRE

SEQ ID NO: 5658 - protein, 15 aa, Artificial Sequence
  Description of Artificial Sequence: Synthetic peptide
  N-term H or Acetyl
  MOD_RES (8)..(8): Tyr or Phospho-Tyr
  MOD_RES (10)..(10): Modified Cys
  See specification as filed for detailed description of substitutions and preferred embodiments
SVSETDDYACIIDVE

SEQ ID NO: 5659 - protein, 15 aa, Artificial Sequence
  Description of Artificial Sequence: Synthetic peptide
  N-term H or Acetyl
  MOD_RES (8)..(8): Tyr or Phospho-Tyr
  MOD_RES (10)..(10): Modified Cys
  See specification as filed for detailed description of substitutions and preferred embodiments
SVSETDDYACIIDWE

SEQ ID NO: 5660 - protein, 15 aa, Artificial Sequence
  Description of Artificial Sequence: Synthetic peptide
  N-term H or Acetyl
  MOD_RES (8)..(8): Tyr or Phospho-Tyr
  MOD_RES (10)..(10): Modified Cys
  See specification as filed for detailed description of substitutions and preferred embodiments
SVSETDDYACIIEEE

SEQ ID NO: 5661 - protein, 15 aa, Artificial Sequence
  Description of Artificial Sequence: Synthetic peptide
  N-term H or Acetyl
  MOD_RES (8)..(8): Tyr or Phospho-Tyr
  MOD_RES (10)..(10): Modified Cys
  See specification as filed for detailed description of substitutions and preferred embodiments
SVSETDDYACIIFEE

SEQ ID NO: 5662 - protein, 15 aa, Artificial Sequence
  Description of Artificial Sequence: Synthetic peptide
  N-term H or Acetyl
  MOD_RES (8)..(8): Tyr or Phospho-Tyr
  MOD_RES (10)..(10): Modified Cys
  See specification as filed for detailed description of substitutions and preferred embodiments
SVSETDDYACIIGEE

SEQ ID NO: 5663 - protein, 15 aa, Artificial Sequence
  Description of Artificial Sequence: Synthetic peptide
  N-term H or Acetyl
  MOD_RES (8)..(8): Tyr or Phospho-Tyr
  MOD_RES (10)..(10): Modified Cys
  See specification as filed for detailed description of substitutions and preferred embodiments
SVSETDDYACIIHEE

SEQ ID NO: 5664 - protein, 15 aa, Artificial Sequence
  Description of Artificial Sequence: Synthetic peptide
  N-term H or Acetyl
  MOD_RES (8)..(8): Tyr or Phospho-Tyr
  MOD_RES (10)..(10): Modified Cys
  See specification as filed for detailed description of substitutions and preferred embodiments
SVSETDDYACIIIEE

SEQ ID NO: 5665 - protein, 15 aa, Artificial Sequence
  Description of Artificial Sequence: Synthetic peptide
  N-term H or Acetyl
  MOD_RES (8)..(8): Tyr or Phospho-Tyr
  MOD_RES (10)..(10): Modified Cys
  See specification as filed for detailed description of substitutions and preferred embodiments
SVSETDDYACIIKEE

SEQ ID NO: 5666 - protein, 15 aa, Artificial Sequence
  Description of Artificial Sequence: Synthetic peptide
  N-term H or Acetyl
  MOD_RES (8)..(8): Tyr or Phospho-Tyr
  MOD_RES (10)..(10): Modified Cys
  See specification as filed for detailed description of substitutions and preferred embodiments
SVSETDDYACIILEE

SEQ ID NO: 5667 - protein, 15 aa, Artificial Sequence
  Description of Artificial Sequence: Synthetic peptide
  N-term H or Acetyl
  MOD_RES (8)..(8): Tyr or Phospho-Tyr
  MOD_RES (10)..(10): Modified Cys
  See specification as filed for detailed description of substitutions and preferred embodiments
SVSETDDYACIINEE

SEQ ID NO: 5668 - protein, 15 aa, Artificial Sequence
  Description of Artificial Sequence: Synthetic peptide
  N-term H or Acetyl
  MOD_RES (8)..(8): Tyr or Phospho-Tyr
  MOD_RES (10)..(10): Modified Cys
  See specification as filed for detailed description of substitutions and preferred embodiments
SVSETDDYACIIPEE

SEQ ID NO: 5669 - protein, 15 aa, Artificial Sequence
  Description of Artificial Sequence: Synthetic peptide
  N-term H or Acetyl
  MOD_RES (8)..(8): Tyr or Phospho-Tyr
  MOD_RES (10)..(10): Modified Cys
  See specification as filed for detailed description of substitutions and preferred embodiments
SVSETDDYACIIQEE

SEQ ID NO: 5670 - protein, 15 aa, Artificial Sequence
  Description of Artificial Sequence: Synthetic peptide
  N-term H or Acetyl
  MOD_RES (8)..(8): Tyr or Phospho-Tyr
  MOD_RES (10)..(10): Modified Cys
  See specification as filed for detailed description of substitutions and preferred embodiments
SVSETDDYACIIREE

SEQ ID NO: 5671 - protein, 15 aa, Artificial Sequence
  Description of Artificial Sequence: Synthetic peptide
  N-term H or Acetyl
  MOD_RES (8)..(8): Tyr or Phospho-Tyr
  MOD_RES (10)..(10): Modified Cys
  See specification as filed for detailed description of substitutions and preferred embodiments
SVSETDDYACIIVEE

SEQ ID NO: 5672 - protein, 15 aa, Artificial Sequence
  Description of Artificial Sequence: Synthetic peptide
  N-term H or Acetyl
  MOD_RES (8)..(8): Tyr or Phospho-Tyr
  MOD_RES (10)..(10): Modified Cys
  See specification as filed for detailed description of substitutions and preferred embodiments
SVSETDDYACIIWEE

SEQ ID NO: 5673 - protein, 15 aa, Artificial Sequence
  Description of Artificial Sequence: Synthetic peptide
  N-term H or Acetyl
  MOD_RES (8)..(8): Tyr or Phospho-Tyr
  MOD_RES (10)..(10): Modified Cys
  See specification as filed for detailed description of substitutions and preferred embodiments
SVSETDDYACIKDEE

SEQ ID NO: 5674 - protein, 15 aa, Artificial Sequence
  Description of Artificial Sequence: Synthetic peptide
  N-term H or Acetyl
  MOD_RES (8)..(8): Tyr or Phospho-Tyr
  MOD_RES (10)..(10): Modified Cys
  See specification as filed for detailed description of substitutions and preferred embodiments
SVSETDDYACILDEE

SEQ ID NO: 5675 - protein, 15 aa, Artificial Sequence
  Description of Artificial Sequence: Synthetic peptide
  N-term H or Acetyl
  MOD_RES (8)..(8): Tyr or Phospho-Tyr
  MOD_RES (10)..(10): Modified Cys
  See specification as filed for detailed description of substitutions and preferred embodiments
SVSETDDYACINDEE

SEQ ID NO: 5676 - protein, 15 aa, Artificial Sequence
  Description of Artificial Sequence: Synthetic peptide
  N-term H or Acetyl
  MOD_RES (8)..(8): Tyr or Phospho-Tyr
  MOD_RES (10)..(10): Modified Cys
  See specification as filed for detailed description of substitutions and preferred embodiments
SVSETDDYACIPDEE

SEQ ID NO: 5677 - protein, 15 aa, Artificial Sequence
  Description of Artificial Sequence: Synthetic peptide
  N-term H or Acetyl
  MOD_RES (8)..(8): Tyr or Phospho-Tyr
  MOD_RES (10)..(10): Modified Cys
  See specification as filed for detailed description of substitutions and preferred embodiments
SVSETDDYACIQDEE

SEQ ID NO: 5678 - protein, 15 aa, Artificial Sequence
  Description of Artificial Sequence: Synthetic peptide
  N-term H or Acetyl
  MOD_RES (8)..(8): Tyr or Phospho-Tyr
  MOD_RES (10)..(10): Modified Cys
  See specification as filed for detailed description of substitutions and preferred embodiments
SVSETDDYACIRDEE

SEQ ID NO: 5679 - protein, 15 aa, Artificial Sequence
  Description of Artificial Sequence: Synthetic peptide
  N-term H or Acetyl
  MOD_RES (8)..(8): Tyr or Phospho-Tyr
  MOD_RES (10)..(10): Modified Cys
  See specification as filed for detailed description of substitutions and preferred embodiments
SVSETDDYACIVDEE

SEQ ID NO: 5680 - protein, 15 aa, Artificial Sequence
  Description of Artificial Sequence: Synthetic peptide
  N-term H or Acetyl
  MOD_RES (8)..(8): Tyr or Phospho-Tyr
  MOD_RES (10)..(10): Modified Cys
  See specification as filed for detailed description of substitutions and preferred embodiments
SVSETDDYACIWDEE

SEQ ID NO: 5681 - protein, 15 aa, Artificial Sequence
  Description of Artificial Sequence: Synthetic peptide
  N-term H or Acetyl
  MOD_RES (8)..(8): Tyr or Phospho-Tyr
  MOD_RES (10)..(10): Modified Cys
  See specification as filed for detailed description of substitutions and preferred embodiments
SVSETDDYACKIDEE

SEQ ID NO: 5682 - protein, 15 aa, Artificial Sequence
  Description of Artificial Sequence: Synthetic peptide
  N-term H or Acetyl
  MOD_RES (8)..(8): Tyr or Phospho-Tyr
  MOD_RES (10)..(10): Modified Cys
  See specification as filed for detailed description of substitutions and preferred embodiments
SVSETDDYACLIDEE

SEQ ID NO: 5683 - protein, 15 aa, Artificial Sequence
  Description of Artificial Sequence: Synthetic peptide
  N-term H or Acetyl
  MOD_RES (8)..(8): Tyr or Phospho-Tyr
  MOD_RES (10)..(10): Modified Cys
  See specification as filed for detailed description of substitutions and preferred embodiments
SVSETDDYACNIDEE

SEQ ID NO: 5684 - protein, 15 aa, Artificial Sequence
  Description of Artificial Sequence: Synthetic peptide
  N-term H or Acetyl
  MOD_RES (8)..(8): Tyr or Phospho-Tyr
  MOD_RES (10)..(10): Modified Cys
  See specification as filed for detailed description of substitutions and preferred embodiments
SVSETDDYACPIDEE

SEQ ID NO: 5685 - protein, 15 aa, Artificial Sequence
  Description of Artificial Sequence: Synthetic peptide
  N-term H or Acetyl
  MOD_RES (8)..(8): Tyr or Phospho-Tyr
  MOD_RES (10)..(10): Modified Cys
  See specification as filed for detailed description of substitutions and preferred embodiments
SVSETDDYACQIDEE

SEQ ID NO: 5686 - protein, 15 aa, Artificial Sequence
  Description of Artificial Sequence: Synthetic peptide
  N-term H or Acetyl
  MOD_RES (8)..(8): Tyr or Phospho-Tyr
  MOD_RES (10)..(10): Modified Cys
  See specification as filed for detailed description of substitutions and preferred embodiments
SVSETDDYACRIDEE

SEQ ID NO: 5687 - protein, 15 aa, Artificial Sequence
  Description of Artificial Sequence: Synthetic peptide
  N-term H or Acetyl
  MOD_RES (8)..(8): Tyr or Phospho-Tyr
  MOD_RES (10)..(10): Modified Cys
  See specification as filed for detailed description of substitutions and preferred embodiments
SVSETDDYACVIDEE

SEQ ID NO: 5688 - protein, 15 aa, Artificial Sequence
  Description of Artificial Sequence: Synthetic peptide
  N-term H or Acetyl
  MOD_RES (8)..(8): Tyr or Phospho-Tyr
  MOD_RES (10)..(10): Modified Cys
  See specification as filed for detailed description of substitutions and preferred embodiments
SVSETDDYACWIDEE

SEQ ID NO: 5689 - protein, 15 aa, Artificial Sequence
  Description of Artificial Sequence: Synthetic peptide
  N-term H or Acetyl
  MOD_RES (8)..(8): Tyr or Phospho-Tyr
  MOD_RES (10)..(10): Modified Cys
  See specification as filed for detailed description of substitutions and preferred embodiments
SVSETDDYDCIIDEE

SEQ ID NO: 5690 - protein, 15 aa, Artificial Sequence
  Description of Artificial Sequence: Synthetic peptide
  N-term H or Acetyl
  MOD_RES (8)..(8): Tyr or Phospho-Tyr
  MOD_RES (10)..(10): Modified Cys
  See specification as filed for detailed description of substitutions and preferred embodiments
SVSETDDYECIIDEE

SEQ ID NO: 5691 - protein, 15 aa, Artificial Sequence
  Description of Artificial Sequence: Synthetic peptide
  N-term H or Acetyl
  MOD_RES (8)..(8): Tyr or Phospho-Tyr
  MOD_RES (10)..(10): Modified Cys
  See specification as filed for detailed description of substitutions and preferred embodiments
SVSETDDYFCIIDEE

SEQ ID NO: 5692 - protein, 15 aa, Artificial Sequence
  Description of Artificial Sequence: Synthetic peptide
  N-term H or Acetyl
  MOD_RES (8)..(8): Tyr or Phospho-Tyr
  MOD_RES (10)..(10): Modified Cys
  See specification as filed for detailed description of substitutions and preferred embodiments
SVSETDDYGCIIDEE

SEQ ID NO: 5693 - protein, 15 aa, Artificial Sequence
  Description of Artificial Sequence: Synthetic peptide
  N-term H or Acetyl
  MOD_RES (8)..(8): Tyr or Phospho-Tyr
  MOD_RES (10)..(10): Modified Cys
  See specification as filed for detailed description of substitutions and preferred embodiments
SVSETDDYHCIIDEE

SEQ ID NO: 5694 - protein, 15 aa, Artificial Sequence
  Description of Artificial Sequence: Synthetic peptide
  N-term H or Acetyl
  MOD_RES (8)..(8): Tyr or Phospho-Tyr
  MOD_RES (10)..(10): Modified Cys
  See specification as filed for detailed description of substitutions and preferred embodiments
SVSETDDYICIIDEE

SEQ ID NO: 5695 - protein, 15 aa, Artificial Sequence
  Description of Artificial Sequence: Synthetic peptide
  N-term H or Acetyl
  MOD_RES (8)..(8): Tyr or Phospho-Tyr
  MOD_RES (10)..(10): Modified Cys
  See specification as filed for detailed description of substitutions and preferred embodiments
SVSETDDYKCIIDEE

SEQ ID NO: 5696 - protein, 15 aa, Artificial Sequence
  Description of Artificial Sequence: Synthetic peptide
  N-term H or Acetyl
  MOD_RES (8)..(8): Tyr or Phospho-Tyr
  MOD_RES (10)..(10): Modified Cys
  See specification as filed for detailed description of substitutions and preferred embodiments
SVSETDDYLCIIDEE

SEQ ID NO: 5697 - protein, 15 aa, Artificial Sequence
  Description of Artificial Sequence: Synthetic peptide
  N-term H or Acetyl
  MOD_RES (8)..(8): Tyr or Phospho-Tyr
  MOD_RES (10)..(10): Modified Cys
  See specification as filed for detailed description of substitutions and preferred embodiments
SVSETDDYNCIIDEE

SEQ ID NO: 5698 - protein, 15 aa, Artificial Sequence
  Description of Artificial Sequence: Synthetic peptide
  N-term H or Acetyl
  MOD_RES (8)..(8): Tyr or Phospho-Tyr
  MOD_RES (10)..(10): Modified Cys
  See specification as filed for detailed description of substitutions and preferred embodiments
SVSETDDYPCIIDEE

SEQ ID NO: 5699 - protein, 15 aa, Artificial Sequence
  Description of Artificial Sequence: Synthetic peptide
  N-term H or Acetyl
  MOD_RES (8)..(8): Tyr or Phospho-Tyr
  MOD_RES (10)..(10): Modified Cys
  See specification as filed for detailed description of substitutions and preferred embodiments
SVSETDDYQCIIDEE

SEQ ID NO: 5700 - protein, 15 aa, Artificial Sequence
  Description of Artificial Sequence: Synthetic peptide
  N-term H or Acetyl
  MOD_RES (8)..(8): Tyr or Phospho-Tyr
  MOD_RES (10)..(10): Modified Cys
  See specification as filed for detailed description of substitutions and preferred embodiments
SVSETDDYRCIIDEE

SEQ ID NO: 5701 - protein, 15 aa, Artificial Sequence
  Description of Artificial Sequence: Synthetic peptide
  N-term H or Acetyl
  MOD_RES (8)..(8): Tyr or Phospho-Tyr
  MOD_RES (10)..(10): Modified Cys
  See specification as filed for detailed description of substitutions and preferred embodiments
SVSETDDYVCIIDEE

SEQ ID NO: 5702 - protein, 15 aa, Artificial Sequence
  Description of Artificial Sequence: Synthetic peptide
  N-term H or Acetyl
  MOD_RES (8)..(8): Tyr or Phospho-Tyr
  MOD_RES (10)..(10): Modified Cys
  See specification as filed for detailed description of substitutions and preferred embodiments
SVSETDDYWCIIDEE

SEQ ID NO: 5703 - protein, 15 aa, Artificial Sequence
  Description of Artificial Sequence: Synthetic peptide
  N-term H or Acetyl
  MOD_RES (8)..(8): Tyr or Phospho-Tyr
  MOD_RES (10)..(10): Modified Cys
  See specification as filed for detailed description of substitutions and preferred embodiments
SVSETDEYACIIDEE

SEQ ID NO: 5704 - protein, 15 aa, Artificial Sequence
  Description of Artificial Sequence: Synthetic peptide
  N-term H or Acetyl
  MOD_RES (8)..(8): Tyr or Phospho-Tyr
  MOD_RES (10)..(10): Modified Cys
  See specification as filed for detailed description of substitutions and preferred embodiments
SVSETDFYACIIDEE

SEQ ID NO: 5705 - protein, 15 aa, Artificial Sequence
  Description of Artificial Sequence: Synthetic peptide
  N-term H or Acetyl
  MOD_RES (8)..(8): Tyr or Phospho-Tyr
  MOD_RES (10)..(10): Modified Cys
  See specification as filed for detailed description of substitutions and preferred embodiments
SVSETDGYACIIDEE

SEQ ID NO: 5706 - protein, 15 aa, Artificial Sequence
  Description of Artificial Sequence: Synthetic peptide
  N-term H or Acetyl
  MOD_RES (8)..(8): Tyr or Phospho-Tyr
  MOD_RES (10)..(10): Modified Cys
  See specification as filed for detailed description of substitutions and preferred embodiments
SVSETDHYACIIDEE

SEQ ID NO: 5707 - protein, 15 aa, Artificial Sequence
  Description of Artificial Sequence: Synthetic peptide
  N-term H or Acetyl
  MOD_RES (8)..(8): Tyr or Phospho-Tyr
  MOD_RES (10)..(10): Modified Cys
  See specification as filed for detailed description of substitutions and preferred embodiments
SVSETDIYACIIDEE

SEQ ID NO: 5708 - protein, 15 aa, Artificial Sequence
  Description of Artificial Sequence: Synthetic peptide
  N-term H or Acetyl
  MOD_RES (8)..(8): Tyr or Phospho-Tyr
  MOD_RES (10)..(10): Modified Cys
  See specification as filed for detailed description of substitutions and preferred embodiments
SVSETDKYACIIDEE

SEQ ID NO: 5709 - protein, 15 aa, Artificial Sequence
  Description of Artificial Sequence: Synthetic peptide
  N-term H or Acetyl
  MOD_RES (8)..(8): Tyr or Phospho-Tyr
  MOD_RES (10)..(10): Modified Cys
  See specification as filed for detailed description of substitutions and preferred embodiments
SVSETDLYACIIDEE

SEQ ID NO: 5710 - protein, 15 aa, Artificial Sequence
  Description of Artificial Sequence: Synthetic peptide
  N-term H or Acetyl
  MOD_RES (8)..(8): Tyr or Phospho-Tyr
  MOD_RES (10)..(10): Modified Cys
  See specification as filed for detailed description of substitutions and preferred embodiments
SVSETDNYACIIDEE

SEQ ID NO: 5711 - protein, 15 aa, Artificial Sequence
  Description of Artificial Sequence: Synthetic peptide
  N-term H or Acetyl
  MOD_RES (8)..(8): Tyr or Phospho-Tyr
  MOD_RES (10)..(10): Modified Cys
  See specification as filed for detailed description of substitutions and preferred embodiments
SVSETDPYACIIDEE

SEQ ID NO: 5712 - protein, 15 aa, Artificial Sequence
  Description of Artificial Sequence: Synthetic peptide
  N-term H or Acetyl
  MOD_RES (8)..(8): Tyr or Phospho-Tyr
  MOD_RES (10)..(10): Modified Cys
  See specification as filed for detailed description of substitutions and preferred embodiments
SVSETDQYACIIDEE

SEQ ID NO: 5713 - protein, 15 aa, Artificial Sequence
  Description of Artificial Sequence: Synthetic peptide
  N-term H or Acetyl
  MOD_RES (8)..(8): Tyr or Phospho-Tyr
  MOD_RES (10)..(10): Modified Cys
  See specification as filed for detailed description of substitutions and preferred embodiments
SVSETDRYACIIDEE

SEQ ID NO: 5714 - protein, 15 aa, Artificial Sequence
  Description of Artificial Sequence: Synthetic peptide
  N-term H or Acetyl
  MOD_RES (8)..(8): Tyr or Phospho-Tyr
  MOD_RES (10)..(10): Modified Cys
  See specification as filed for detailed description of substitutions and preferred embodiments
SVSETDVYACIIDEE

SEQ ID NO: 5715 - protein, 15 aa, Artificial Sequence
  Description of Artificial Sequence: Synthetic peptide
  N-term H or Acetyl
  MOD_RES (8)..(8): Tyr or Phospho-Tyr
  MOD_RES (10)..(10): Modified Cys
  See specification as filed for detailed description of substitutions and preferred embodiments
SVSETDWYACIIDEE

SEQ ID NO: 5716 - protein, 15 aa, Artificial Sequence
  Description of Artificial Sequence: Synthetic peptide
  N-term H or Acetyl
  MOD_RES (8)..(8): Tyr or Phospho-Tyr
  MOD_RES (10)..(10): Modified Cys
  See specification as filed for detailed description of substitutions and preferred embodiments
SVSETEDYACIIDEE

SEQ ID NO: 5717 - protein, 15 aa, Artificial Sequence
  Description of Artificial Sequence: Synthetic peptide
  N-term H or Acetyl
  MOD_RES (8)..(8): Tyr or Phospho-Tyr
  MOD_RES (10)..(10): Modified Cys
  See specification as filed for detailed description of substitutions and preferred embodiments
SVSETFDYACIIDEE

SEQ ID NO: 5718 - protein, 15 aa, Artificial Sequence
  Description of Artificial Sequence: Synthetic peptide
  N-term H or Acetyl
  MOD_RES (8)..(8): Tyr or Phospho-Tyr
  MOD_RES (10)..(10): Modified Cys
  See specification as filed for detailed description of substitutions and preferred embodiments
SVSETGDYACIIDEE

SEQ ID NO: 5719 - protein, 15 aa, Artificial Sequence
  Description of Artificial Sequence: Synthetic peptide
  N-term H or Acetyl
  MOD_RES (8)..(8): Tyr or Phospho-Tyr
  MOD_RES (10)..(10): Modified Cys
  See specification as filed for detailed description of substitutions and preferred embodiments
SVSETHDYACIIDEE

SEQ ID NO: 5720 - protein, 15 aa, Artificial Sequence
  Description of Artificial Sequence: Synthetic peptide
  N-term H or Acetyl
  MOD_RES (8)..(8): Tyr or Phospho-Tyr
  MOD_RES (10)..(10): Modified Cys
  See specification as filed for detailed description of substitutions and preferred embodiments
SVSETIDYACIIDEE

SEQ ID NO: 5721 - protein, 15 aa, Artificial Sequence
  Description of Artificial Sequence: Synthetic peptide
  N-term H or Acetyl
  MOD_RES (8)..(8): Tyr or Phospho-Tyr
  MOD_RES (10)..(10): Modified Cys
  See specification as filed for detailed description of substitutions and preferred embodiments
SVSETKDYACIIDEE

SEQ ID NO: 5722 - protein, 15 aa, Artificial Sequence
  Description of Artificial Sequence: Synthetic peptide
  N-term H or Acetyl
  MOD_RES (8)..(8): Tyr or Phospho-Tyr
  MOD_RES (10)..(10): Modified Cys
  See specification as filed for detailed description of substitutions and preferred embodiments
SVSETLDYACIIDEE

SEQ ID NO: 5723 - protein, 15 aa, Artificial Sequence
  Description of Artificial Sequence: Synthetic peptide
  N-term H or Acetyl
  MOD_RES (8)..(8): Tyr or Phospho-Tyr
  MOD_RES (10)..(10): Modified Cys
  See specification as filed for detailed description of substitutions and preferred embodiments
SVSETNDYACIIDEE

SEQ ID NO: 5724 - protein, 15 aa, Artificial Sequence
  Description of Artificial Sequence: Synthetic peptide
  N-term H or Acetyl
  MOD_RES (8)..(8): Tyr or Phospho-Tyr
  MOD_RES (10)..(10): Modified Cys
  See specification as filed for detailed description of substitutions and preferred embodiments
SVSETPDYACIIDEE

SEQ ID NO: 5725 - protein, 15 aa, Artificial Sequence
  Description of Artificial Sequence: Synthetic peptide
  N-term H or Acetyl
  MOD_RES (8)..(8): Tyr or Phospho-Tyr
  MOD_RES (10)..(10): Modified Cys
  See specification as filed for detailed description of substitutions and preferred embodiments
SVSETQDYACIIDEE

SEQ ID NO: 5726 - protein, 15 aa, Artificial Sequence
  Description of Artificial Sequence: Synthetic peptide
  N-term H or Acetyl
  MOD_RES (8)..(8): Tyr or Phospho-Tyr
  MOD_RES (10)..(10): Modified Cys
  See specification as filed for detailed description of substitutions and preferred embodiments
SVSETRDYACIIDEE

SEQ ID NO: 5727 - protein, 15 aa, Artificial Sequence
  Description of Artificial Sequence: Synthetic peptide
  N-term H or Acetyl
  MOD_RES (8)..(8): Tyr or Phospho-Tyr
  MOD_RES (10)..(10): Modified Cys
  See specification as filed for detailed description of substitutions and preferred embodiments
SVSETVDYACIIDEE

SEQ ID NO: 5728 - protein, 15 aa, Artificial Sequence
  Description of Artificial Sequence: Synthetic peptide
  N-term H or Acetyl
  MOD_RES (8)..(8): Tyr or Phospho-Tyr
  MOD_RES (10)..(10): Modified Cys
  See specification as filed for detailed description of substitutions and preferred embodiments
SVSETWDYACIIDEE

SEQ ID NO: 5729 - protein, 15 aa, Artificial Sequence
  Description of Artificial Sequence: Synthetic peptide
  N-term H or Acetyl
  MOD_RES (8)..(8): Tyr or Phospho-Tyr
  MOD_RES (10)..(10): Modified Cys
  See specification as filed for detailed description of substitutions and preferred embodiments
SVSEVDDYACIIDEE

SEQ ID NO: 5730 - protein, 15 aa, Artificial Sequence
  Description of Artificial Sequence: Synthetic peptide
  N-term H or Acetyl
  MOD_RES (8)..(8): Tyr or Phospho-Tyr
  MOD_RES (10)..(10): Modified Cys
  See specification as filed for detailed description of substitutions and preferred embodiments
SVSEWDDYACIIDEE

SEQ ID NO: 5731 - protein, 15 aa, Artificial Sequence
  Description of Artificial Sequence: Synthetic peptide
  N-term H or Acetyl
  MOD_RES (8)..(8): Tyr or Phospho-Tyr
  MOD_RES (10)..(10): Modified Cys
  See specification as filed for detailed description of substitutions and preferred embodiments
SVSFTDDYACIIDEE

SEQ ID NO: 5732 - protein, 15 aa, Artificial Sequence
  Description of Artificial Sequence: Synthetic peptide
  N-term H or Acetyl
  MOD_RES (8)..(8): Tyr or Phospho-Tyr
  MOD_RES (10)..(10): Modified Cys
  See specification as filed for detailed description of substitutions and preferred embodiments
SVSGTDDYACIIDEE

SEQ ID NO: 5733 - protein, 15 aa, Artificial Sequence
  Description of Artificial Sequence: Synthetic peptide
  N-term H or Acetyl
  MOD_RES (8)..(8): Tyr or Phospho-Tyr
  MOD_RES (10)..(10): Modified Cys
  See specification as filed for detailed description of substitutions and preferred embodiments
SVSHTDDYACIIDEE

SEQ ID NO: 5734 - protein, 15 aa, Artificial Sequence
  Description of Artificial Sequence: Synthetic peptide
  N-term H or Acetyl
  MOD_RES (8)..(8): Tyr or Phospho-Tyr
  MOD_RES (10)..(10): Modified Cys
  See specification as filed for detailed description of substitutions and preferred embodiments
SVSITDDYACIIDEE

SEQ ID NO: 5735 - protein, 15 aa, Artificial Sequence
  Description of Artificial Sequence: Synthetic peptide
  N-term H or Acetyl
  MOD_RES (8)..(8): Tyr or Phospho-Tyr
  MOD_RES (10)..(10): Modified Cys
  See specification as filed for detailed description of substitutions and preferred embodiments
SVSKTDDYACIIDEE

SEQ ID NO: 5736 - protein, 15 aa, Artificial Sequence
  Description of Artificial Sequence: Synthetic peptide
  N-term H or Acetyl
  MOD_RES (8)..(8): Tyr or Phospho-Tyr
  MOD_RES (10)..(10): Modified Cys
  See specification as filed for detailed description of substitutions and preferred embodiments
SVSLTDDYACIIDEE

SEQ ID NO: 5737 - protein, 15 aa, Artificial Sequence
  Description of Artificial Sequence: Synthetic peptide
  N-term H or Acetyl
  MOD_RES (8)..(8): Tyr or Phospho-Tyr
  MOD_RES (10)..(10): Modified Cys
  See specification as filed for detailed description of substitutions and preferred embodiments
SVSNTDDYACIIDEE

SEQ ID NO: 5738 - protein, 15 aa, Artificial Sequence
  Description of Artificial Sequence: Synthetic peptide
  N-term H or Acetyl
  MOD_RES (8)..(8): Tyr or Phospho-Tyr
  MOD_RES (10)..(10): Modified Cys
  See specification as filed for detailed description of substitutions and preferred embodiments
SVSPTDDYACIIDEE

SEQ ID NO: 5739 - protein, 15 aa, Artificial Sequence
  Description of Artificial Sequence: Synthetic peptide
  N-term H or Acetyl
  MOD_RES (8)..(8): Tyr or Phospho-Tyr
  MOD_RES (10)..(10): Modified Cys
  See specification as filed for detailed description of substitutions and preferred embodiments
SVSQTDDYACIIDEE

SEQ ID NO: 5740 - protein, 15 aa, Artificial Sequence
  Description of Artificial Sequence: Synthetic peptide
  N-term H or Acetyl
  MOD_RES (8)..(8): Tyr or Phospho-Tyr
  MOD_RES (10)..(10): Modified Cys
  See specification as filed for detailed description of substitutions and preferred embodiments
SVSRTDDYACIIDEE

SEQ ID NO: 5741 - protein, 15 aa, Artificial Sequence
  Description of Artificial Sequence: Synthetic peptide
  N-term H or Acetyl
  MOD_RES (8)..(8): Tyr or Phospho-Tyr
  MOD_RES (10)..(10): Modified Cys
  See specification as filed for detailed description of substitutions and preferred embodiments
SVSVTDDYACIIDEE

SEQ ID NO: 5742 - protein, 15 aa, Artificial Sequence
  Description of Artificial Sequence: Synthetic peptide
  N-term H or Acetyl
  MOD_RES (8)..(8): Tyr or Phospho-Tyr
  MOD_RES (10)..(10): Modified Cys
  See specification as filed for detailed description of substitutions and preferred embodiments
SVSWTDDYACIIDEE

SEQ ID NO: 5743 - protein, 15 aa, Artificial Sequence
  Description of Artificial Sequence: Synthetic peptide
  N-term H or Acetyl
  MOD_RES (8)..(8): Tyr or Phospho-Tyr
  MOD_RES (10)..(10): Modified Cys
  See specification as filed for detailed description of substitutions and preferred embodiments
SVVETDDYACIIDEE

SEQ ID NO: 5744 - protein, 15 aa, Artificial Sequence
  Description of Artificial Sequence: Synthetic peptide
  N-term H or Acetyl
  MOD_RES (8)..(8): Tyr or Phospho-Tyr
  MOD_RES (10)..(10): Modified Cys
  See specification as filed for detailed description of substitutions and preferred embodiments
SVWETDDYACIIDEE

SEQ ID NO: 5745 - protein, 15 aa, Artificial Sequence
  Description of Artificial Sequence: Synthetic peptide
  N-term H or Acetyl
  MOD_RES (8)..(8): Tyr or Phospho-Tyr
  MOD_RES (10)..(10): Modified Cys
  See specification as filed for detailed description of substitutions and preferred embodiments
SWSETDDYACIIDEE

SEQ ID NO: 5746 - protein, 15 aa, Artificial Sequence
  Description of Artificial Sequence: Synthetic peptide
  N-term H or Acetyl
  MOD_RES (8)..(8): Tyr or Phospho-Tyr
  MOD_RES (10)..(10): Modified Cys
  See specification as filed for detailed description of substitutions and preferred embodiments
TDGEDADYTCFTNQQ

SEQ ID NO: 5747 - protein, 14 aa, Artificial Sequence
  Description of Artificial Sequence: Synthetic peptide
  N-term H or Acetyl
  MOD_RES (5)..(5): Modified Cys
  MOD_RES (7)..(7): Tyr or Phospho-Tyr
  See specification as filed for detailed description of substitutions and preferred embodiments
TDVECTYADFIASG

SEQ ID NO: 5748 - protein, 15 aa, Artificial Sequence
  Description of Artificial Sequence: Synthetic peptide
  N-term H or Acetyl
  MOD_RES (8)..(8): Tyr or Phospho-Tyr
  MOD_RES (10)..(10): Modified Cys
  See specification as filed for detailed description of substitutions and preferred embodiments
TEADGELYVCNTPSG

SEQ ID NO: 5749 - protein, 15 aa, Artificial Sequence
  Description of Artificial Sequence: Synthetic peptide
  N-term H or Acetyl
  MOD_RES (8)..(8): Ser or Phospho-Ser
  MOD_RES (10)..(10): Modified Cys
  See specification as filed for detailed description of substitutions and preferred embodiments
TEERLPSSPCYEDAA

SEQ ID NO: 5750 - protein, 15 aa, Artificial Sequence
  Description of Artificial Sequence: Synthetic peptide
  N-term H or Acetyl
  MOD_RES (8)..(8): Tyr or Phospho-Tyr
  MOD_RES (10)..(10): Modified Cys
  See specification as filed for detailed description of substitutions and preferred embodiments
TENDDDVYRCLEELA

SEQ ID NO: 5751 - protein, 15 aa, Artificial Sequence
  Description of Artificial Sequence: Synthetic peptide
  N-term H or Acetyl
  MOD_RES (6)..(6): Modified Cys
  MOD_RES (8)..(8): Tyr or Phospho-Tyr
  See specification as filed for detailed description of substitutions and preferred embodiments
TFLPVCEYINQSVPK

SEQ ID NO: 5752 - protein, 15 aa, Artificial Sequence
  Description of Artificial Sequence: Synthetic peptide
  N-term H or Acetyl
  MOD_RES (8)..(8): Tyr or Phospho-Tyr
  MOD_RES (10)..(10): Modified Cys
  See specification as filed for detailed description of substitutions and preferred embodiments
TFLPVPEYICQSVPK

SEQ ID NO: 5753 - protein, 15 aa, Artificial Sequence
  Description of Artificial Sequence: Synthetic peptide
  N-term H or Acetyl
  MOD_RES (3)..(3): Leu or Nle (i.e. isomer of Leucine)
  MOD_RES (8)..(8): Tyr or Phospho-Tyr
  MOD_RES (10)..(10): Modified Cys
  See specification as filed for detailed description of substitutions and preferred embodiments
TGLFPRNYVCPVNRN

SEQ ID NO: 5754 - protein, 15 aa, Artificial Sequence
  Description of Artificial Sequence: Synthetic peptide
  N-term H or Acetyl
  MOD_RES (8)..(8): Tyr or Phospho-Tyr
  MOD_RES (10)..(10): Modified Cys
  See specification as filed for detailed description of substitutions and preferred embodiments
TLMEKDSYPCFLKSP

SEQ ID NO: 5755 - protein, 14 aa, Artificial Sequence
  Description of Artificial Sequence: Synthetic peptide
  N-term H or Acetyl
  MOD_RES (6)..(6): Modified Cys
  MOD_RES (8)..(8): Tyr or Phospho-Tyr
  See specification as filed for detailed description of substitutions and preferred embodiments
TPENNCEYAKVSGV

SEQ ID NO: 5756 - protein, 15 aa, Artificial Sequence
  Description of Artificial Sequence: Synthetic peptide
  N-term H or Acetyl
  MOD_RES (8)..(8): Tyr or Phospho-Tyr
  MOD_RES (10)..(10): Modified Cys
  See specification as filed for detailed description of substitutions and preferred embodiments
TQEQYELYSCMGSTF

SEQ ID NO: 5757 - protein, 15 aa, Artificial Sequence
  Description of Artificial Sequence: Synthetic peptide
  N-term H or Acetyl
  MOD_RES (8)..(8): Tyr or Phospho-Tyr
  MOD_RES (10)..(10): Modified Cys
  See specification as filed for detailed description of substitutions and preferred embodiments
TVDGKEIYNCIRRKT

SEQ ID NO: 5758 - protein, 15 aa, Artificial Sequence
  Description of Artificial Sequence: Synthetic peptide
  N-term H or Acetyl
  MOD_RES (8)..(8): Tyr or Phospho-Tyr
  MOD_RES (10)..(10): Modified Cys
  See specification as filed for detailed description of substitutions and preferred embodiments
VADERVDYVCVDQQK

SEQ ID NO: 5759 - protein, 8 aa, Artificial Sequence
  Description of Artificial Sequence: Synthetic peptide
  N-term H or Acetyl
  MOD_RES (6)..(6): Tyr or Phospho-Tyr
  MOD_RES (8)..(8): Modified Cys
  See specification as filed for detailed description of substitutions and preferred embodiments
VEEEEYIC

SEQ ID NO: 5760 - protein, 9 aa, Artificial Sequence
  Description of Artificial Sequence: Synthetic peptide
  N-term H or Acetyl
  MOD_RES (5)..(5): Tyr or Phospho-Tyr
  MOD_RES (7)..(7): Modified Cys
  See specification as filed for detailed description of substitutions and preferred embodiments
VEEEYICIV

SEQ ID NO: 5761 - protein, 16 aa, Artificial Sequence
  Description of Artificial Sequence: Synthetic peptide
  N-term H or Acetyl
  MOD_RES (10)..(10): Ser or Phospho-Ser
  MOD_RES (12)..(12): Modified Cys
  See specification as filed for detailed description of substitutions and preferred embodiments
VQPSPARSSSYCEANE

SEQ ID NO: 5762 - protein, 16 aa, Artificial Sequence
  Description of Artificial Sequence: Synthetic peptide
  N-term H or Acetyl
  MOD_RES (7)..(7): Tyr or Phospho-Tyr
  MOD_RES (9)..(9): Modified Cys
  See specification as filed for detailed description of substitutions and preferred embodiments
VSETDDYACIIDEEDT

SEQ ID NO: 5763 - protein, 10 aa, Artificial Sequence
  Description of Artificial Sequence: Synthetic peptide
  N-term H or Acetyl
  MOD_RES (6)..(6): Modified Cys
  MOD_RES (8)..(8): Tyr or Phospho-Tyr
  See specification as filed for detailed description of substitutions and preferred embodiments
VTRRTCDYFL

SEQ ID NO: 5764 - protein, 15 aa, Artificial Sequence
  Description of Artificial Sequence: Synthetic peptide
  N-term H or Acetyl
  MOD_RES (8)..(8): Tyr or Phospho-Tyr
  MOD_RES (10)..(10): Modified Cys
  See specification as filed for detailed description of substitutions and preferred embodiments
VVSETDDYACIIDEE

SEQ ID NO: 5765 - protein, 16 aa, Artificial Sequence
  Description of Artificial Sequence: Synthetic peptide
  N-term H or Acetyl
  MOD_RES (2)..(2): Tyr or Phospho-Tyr
  MOD_RES (4)..(4): Modified Cys
  MOD_RES (7)..(7): Tyr or Phospho-Tyr
  See specification as filed for detailed description of substitutions and preferred embodiments
VYSCDYYRLFNPSKKK

SEQ ID NO: 5766 - protein, 16 aa, Artificial Sequence
  Description of Artificial Sequence: Synthetic peptide
  N-term H or Acetyl
  MOD_RES (2)..(2): Tyr or Phospho-Tyr
  MOD_RES (4)..(4): Modified Cys
  See specification as filed for detailed description of substitutions and preferred embodiments
VYSCDYYRLFNPSKKK

SEQ ID NO: 5767 - protein, 16 aa, Artificial Sequence
  Description of Artificial Sequence: Synthetic peptide
  N-term H or Acetyl
  MOD_RES (4)..(4): Modified Cys
  MOD_RES (6)..(6): Tyr or Phospho-Tyr
  MOD_RES (7)..(7): Tyr or Phospho-Tyr
  See specification as filed for detailed description of substitutions and preferred embodiments
VYSCDYYRLFNPSKKK

SEQ ID NO: 5768 - protein, 16 aa, Artificial Sequence
  Description of Artificial Sequence: Synthetic peptide
  N-term H or Acetyl
  MOD_RES (4)..(4): Modified Cys
  MOD_RES (6)..(6): Tyr or Phospho-Tyr
  See specification as filed for detailed description of substitutions and preferred embodiments
VYSCDYYRLFNPSKKK

SEQ ID NO: 5769 - protein, 8 aa, Artificial Sequence
  Description of Artificial Sequence: Synthetic peptide
  N-term H or Acetyl
  MOD_RES (6)..(6): Tyr or Phospho-Tyr
  MOD_RES (8)..(8): Modified Cys
  See specification as filed for detailed description of substitutions and preferred embodiments
WEEEEYIC

SEQ ID NO: 5770 - protein, 9 aa, Artificial Sequence
  Description of Artificial Sequence: Synthetic peptide
  N-term H or Acetyl
  MOD_RES (5)..(5): Tyr or Phospho-Tyr
  MOD_RES (7)..(7): Modified Cys
  See specification as filed for detailed description of substitutions and preferred embodiments
WEEEYICIV

SEQ ID NO: 5771 - protein, 15 aa, Artificial Sequence
  Description of Artificial Sequence: Synthetic peptide
  N-term H or Acetyl
  MOD_RES (8)..(8): Tyr or Phospho-Tyr
  MOD_RES (10)..(10): Modified Cys
  See specification as filed for detailed description of substitutions and preferred embodiments
WVSETDDYACIIDEE

SEQ ID NO: 5772 - protein, 8 aa, Artificial Sequence
  Description of Artificial Sequence: Synthetic peptide
  N-term H or Acetyl
  MOD_RES (4)..(4): Tyr or Phospho-Tyr
  MOD_RES (6)..(6): Modified Cys
  See specification as filed for detailed description of substitutions and preferred embodiments
EPDYICFG

SEQ ID NO: 5773 - protein, 7 aa, Artificial Sequence
  Description of Artificial Sequence: Synthetic peptide
  N-term H or Acetyl
  MOD_RES (3)..(3): Tyr or Phospho-Tyr
  MOD_RES (5)..(5): Modified Cys
  See specification as filed for detailed description of substitutions and preferred embodiments
PDYICFG

SEQ ID NO: 5774 - protein, 16 aa, Artificial Sequence
  Description of Artificial Sequence: Synthetic peptide
  N-term H or Acetyl
  MOD_RES (8)..(8): Tyr or Phospho-Tyr
  MOD_RES (10)..(10): Modified Cys
  See specification as filed for detailed description of substitutions and preferred embodiments
KKHTDDGYMCMSPGVA

SEQ ID NO: 5775 - protein, 16 aa, Artificial Sequence
  Description of Artificial Sequence: Synthetic peptide
  N-term H or Acetyl
  MOD_RES (6)..(6): Modified Cys
  MOD_RES (8)..(8): Tyr or Phospho-Tyr
  See specification as filed for detailed description of substitutions and preferred embodiments
KKHTDCGYMPMSPGVA

SEQ ID NO: 5776 - protein, 16 aa, Artificial Sequence
  Description of Artificial Sequence: Synthetic peptide
  N-term H or Acetyl
  MOD_RES (5)..(5): Modified Cys
  MOD_RES (8)..(8): Tyr or Phospho-Tyr
  See specification as filed for detailed description of substitutions and preferred embodiments
KKHTCDGYMPMSPGVA

SEQ ID NO: 5777 - protein, 16 aa, Artificial Sequence
  Description of Artificial Sequence: Synthetic peptide
  N-term H or Acetyl
  MOD_RES (8)..(8): Tyr or Phospho-Tyr
  MOD_RES (9)..(9): Leu or Nle (i.e. isomer of Leucine)
  MOD_RES (10)..(10): Modified Cys
  MOD_RES (11)..(11): Leu or Nle (i.e. isomer of Leucine)
  See specification as filed for detailed description of substitutions and preferred embodiments
KKHTDDGYLCLSPGVA

SEQ ID NO: 5778 - protein, 16 aa, Artificial Sequence
  Description of Artificial Sequence: Synthetic peptide
  N-term H or Acetyl
  MOD_RES (6)..(6): Modified Cys
  MOD_RES (8)..(8): Tyr or Phospho-Tyr
  MOD_RES (9)..(9): Leu or Nle (i.e. isomer of Leucine)
  MOD_RES (11)..(11): Leu or Nle (i.e. isomer of Leucine)
  See specification as filed for detailed description of substitutions and preferred embodiments
KKHTDCGYLPLSPGVA

SEQ ID NO: 5779 - protein, 16 aa, Artificial Sequence
  Description of Artificial Sequence: Synthetic peptide
  N-term H or Acetyl
  MOD_RES (5)..(5): Modified Cys
  MOD_RES (8)..(8): Tyr or Phospho-Tyr
  MOD_RES (9)..(9): Leu or Nle (i.e. isomer of Leucine)
  MOD_RES (11)..(11): Leu or Nle (i.e. isomer of Leucine)
  See specification as filed for detailed description of substitutions and preferred embodiments
KKHTCDGYLPLSPGVA

SEQ ID NO: 5780 - protein, 12 aa, Artificial Sequence
  Description of Artificial Sequence: Synthetic peptide
  N-term H or Acetyl
  MOD_RES (8)..(8): Tyr or Phospho-Tyr
  MOD_RES (10)..(10): Modified Cys
  See specification as filed for detailed description of substitutions and preferred embodiments
KKAEEEEYICLV

SEQ ID NO: 5781 - protein, 13 aa, Artificial Sequence
  Description of Artificial Sequence: Synthetic peptide
  N-term H or Acetyl
  MOD_RES (9)..(9): Tyr or Phospho-Tyr
  MOD_RES (11)..(11): Modified Cys
  See specification as filed for detailed description of substitutions and preferred embodiments
RRRAEEEEYICLV

SEQ ID NO: 5782 - protein, 12 aa, Artificial Sequence
  Description of Artificial Sequence: Synthetic peptide
  N-term H or Acetyl
  MOD_RES (8)..(8): Tyr or Phospho-Tyr
  MOD_RES (10)..(10): Modified Cys
  See specification as filed for detailed description of substitutions and preferred embodiments
RRAEEEEYICLV

SEQ ID NO: 5783 - protein, 12 aa, Artificial Sequence
  Description of Artificial Sequence: Synthetic peptide
  N-term H or Acetyl
  MOD_RES (1)..(1): Leu or Nle (i.e. isomer of Leucine)
  MOD_RES (2)..(2): Modified Cys
  MOD_RES (4)..(4): Tyr or Phospho-Tyr
  MOD_RES (5)..(5): Leu or Nle (i.e. isomer of Leucine)
  See specification as filed for detailed description of substitutions and preferred embodiments
LCDYLTMQIGKK

SEQ ID NO: 5784 - protein, 12 aa, Artificial Sequence
  Description of Artificial Sequence: Synthetic peptide
  N-term H or Acetyl
  MOD_RES (2)..(2): Modified Cys
  MOD_RES (4)..(4): Tyr or Phospho-Tyr
  MOD_RES (5)..(5): Leu or Nle (i.e. isomer of Leucine)
  See specification as filed for detailed description of substitutions and preferred embodiments
ACDYLTMQIGKK

SEQ ID NO: 5785 - protein, 12 aa, Artificial Sequence
  Description of Artificial Sequence: Synthetic peptide
  N-term H or Acetyl
  MOD_RES (2)..(2): Modified Cys
  MOD_RES (4)..(4): Tyr or Phospho-Tyr
  MOD_RES (5)..(5): Leu or Nle (i.e. isomer of Leucine)
  See specification as filed for detailed description of substitutions and preferred embodiments
DCDYLTMQIGKK

SEQ ID NO: 5786 - protein, 12 aa, Artificial Sequence
  Description of Artificial Sequence: Synthetic peptide
  N-term H or Acetyl
  MOD_RES (2)..(2): Modified Cys
  MOD_RES (4)..(4): Tyr or Phospho-Tyr
  MOD_RES (5)..(5): Leu or Nle (i.e. isomer of Leucine)
  See specification as filed for detailed description of substitutions and preferred embodiments
ECDYLTMQIGKK

SEQ ID NO: 5787 - protein, 12 aa, Artificial Sequence
  Description of Artificial Sequence: Synthetic peptide
  N-term H or Acetyl
  MOD_RES (2)..(2): Modified Cys
  MOD_RES (4)..(4): Tyr or Phospho-Tyr
  MOD_RES (5)..(5): Leu or Nle (i.e. isomer of Leucine)
  See specification as filed for detailed description of substitutions and preferred embodiments
FCDYLTMQIGKK

SEQ ID NO: 5788 - protein, 12 aa, Artificial Sequence
  Description of Artificial Sequence: Synthetic peptide
  N-term H or Acetyl
  MOD_RES (2)..(2): Modified Cys
  MOD_RES (4)..(4): Tyr or Phospho-Tyr
  MOD_RES (5)..(5): Leu or Nle (i.e. isomer of Leucine)
  See specification as filed for detailed description of substitutions and preferred embodiments
GCDYLTMQIGKK

SEQ ID NO: 5789 - protein, 12 aa, Artificial Sequence
  Description of Artificial Sequence: Synthetic peptide
  N-term H or Acetyl
  MOD_RES (2)..(2): Modified Cys
  MOD_RES (4)..(4): Tyr or Phospho-Tyr
  MOD_RES (5)..(5): Leu or Nle (i.e. isomer of Leucine)
  See specification as filed for detailed description of substitutions and preferred embodiments
HCDYLTMQIGKK

SEQ ID NO: 5790 - protein, 12 aa, Artificial Sequence
  Description of Artificial Sequence: Synthetic peptide
  N-term H or Acetyl
  MOD_RES (2)..(2): Modified Cys
  MOD_RES (4)..(4): Tyr or Phospho-Tyr
  MOD_RES (5)..(5): Leu or Nle (i.e. isomer of Leucine)
  See specification as filed for detailed description of substitutions and preferred embodiments
ICDYLTMQIGKK

SEQ ID NO: 5791 - protein, 12 aa, Artificial Sequence
  Description of Artificial Sequence: Synthetic peptide
  N-term H or Acetyl
  MOD_RES (2)..(2): Modified Cys
  MOD_RES (4)..(4): Tyr or Phospho-Tyr
  MOD_RES (5)..(5): Leu or Nle (i.e. isomer of Leucine)
  See specification as filed for detailed description of substitutions and preferred embodiments
KCDYLTMQIGKK

SEQ ID NO: 5792 - protein, 12 aa, Artificial Sequence
  Description of Artificial Sequence: Synthetic peptide
  N-term H or Acetyl
  MOD_RES (2)..(2): Modified Cys
  MOD_RES (4)..(4): Tyr or Phospho-Tyr
  MOD_RES (5)..(5): Leu or Nle (i.e. isomer of Leucine)
  See specification as filed for detailed description of substitutions and preferred embodiments
LCDYLTMQIGKK

SEQ ID NO: 5793 - protein, 12 aa, Artificial Sequence
  Description of Artificial Sequence: Synthetic peptide
  N-term H or Acetyl
  MOD_RES (2)..(2): Modified Cys
  MOD_RES (4)..(4): Tyr or Phospho-Tyr
  MOD_RES (5)..(5): Leu or Nle (i.e. isomer of Leucine)
  See specification as filed for detailed description of substitutions and preferred embodiments
NCDYLTMQIGKK

SEQ ID NO: 5794 - protein, 12 aa, Artificial Sequence
  Description of Artificial Sequence: Synthetic peptide
  N-term H or Acetyl
  MOD_RES (2)..(2): Modified Cys
  MOD_RES (4)..(4): Tyr or Phospho-Tyr
  MOD_RES (5)..(5): Leu or Nle (i.e. isomer of Leucine)
  See specification as filed for detailed description of substitutions and preferred embodiments
PCDYLTMQIGKK

SEQ ID NO: 5795 - protein, 12 aa, Artificial Sequence
  Description of Artificial Sequence: Synthetic peptide
  N-term H or Acetyl
  MOD_RES (2)..(2): Modified Cys
  MOD_RES (4)..(4): Tyr or Phospho-Tyr
  MOD_RES (5)..(5): Leu or Nle (i.e. isomer of Leucine)
  See specification as filed for detailed description of substitutions and preferred embodiments
QCDYLTMQIGKK

SEQ ID NO: 5796 - protein, 12 aa, Artificial Sequence
  Description of Artificial Sequence: Synthetic peptide
  N-term H or Acetyl
  MOD_RES (2)..(2): Modified Cys
  MOD_RES (3)..(3): Leu or Nle (i.e. isomer of Leucine)
  MOD_RES (4)..(4): Tyr or Phospho-Tyr
  MOD_RES (5)..(5): Leu or Nle (i.e. isomer of Leucine)
  See specification as filed for detailed description of substitutions and preferred embodiments
RCLYLTMQIGKK

SEQ ID NO: 5797 - protein, 12 aa, Artificial Sequence
  Description of Artificial Sequence: Synthetic peptide
  N-term H or Acetyl
  MOD_RES (2)..(2): Modified Cys
  MOD_RES (4)..(4): Tyr or Phospho-Tyr
  MOD_RES (5)..(5): Leu or Nle (i.e. isomer of Leucine)
  See specification as filed for detailed description of substitutions and preferred embodiments
RCAYLTMQIGKK

SEQ ID NO: 5798 - protein, 12 aa, Artificial Sequence
  Description of Artificial Sequence: Synthetic peptide
  N-term H or Acetyl
  MOD_RES (2)..(2): Modified Cys
  MOD_RES (4)..(4): Tyr or Phospho-Tyr
  MOD_RES (5)..(5): Leu or Nle (i.e. isomer of Leucine)
  MOD_RES (6)..(6): Leu or Nle (i.e. isomer of Leucine)
  See specification as filed for detailed description of substitutions and preferred embodiments
RCDYLLMQIGKK

SEQ ID NO: 5799 - protein, 12 aa, Artificial Sequence
  Description of Artificial Sequence: Synthetic peptide
  N-term H or Acetyl
  MOD_RES (2)..(2): Modified Cys
  MOD_RES (4)..(4): Tyr or Phospho-Tyr
  MOD_RES (5)..(5): Leu or Nle (i.e. isomer of Leucine)
  See specification as filed for detailed description of substitutions and preferred embodiments
RCDYLAMQIGKK

SEQ ID NO: 5800 - protein, 12 aa, Artificial Sequence
  Description of Artificial Sequence: Synthetic peptide
  N-term H or Acetyl
  MOD_RES (2)..(2): Modified Cys
  MOD_RES (4)..(4): Tyr or Phospho-Tyr
  MOD_RES (5)..(5): Leu or Nle (i.e. isomer of Leucine)
  See specification as filed for detailed description of substitutions and preferred embodiments
RCDYLDMQIGKK

SEQ ID NO: 5801 - protein, 12 aa, Artificial Sequence
  Description of Artificial Sequence: Synthetic peptide
  N-term H or Acetyl
  MOD_RES (2)..(2): Modified Cys
  MOD_RES (4)..(4): Tyr or Phospho-Tyr
  MOD_RES (5)..(5): Leu or Nle (i.e. isomer of Leucine)
  See specification as filed for detailed description of substitutions and preferred embodiments
RCDYLEMQIGKK

SEQ ID NO: 5802 - protein, 12 aa, Artificial Sequence
  Description of Artificial Sequence: Synthetic peptide
  N-term H or Acetyl
  MOD_RES (2)..(2): Modified Cys
  MOD_RES (4)..(4): Tyr or Phospho-Tyr
  MOD_RES (5)..(5): Leu or Nle (i.e. isomer of Leucine)
  See specification as filed for detailed description of substitutions and preferred embodiments
RCDYLFMQIGKK

SEQ ID NO: 5803 - protein, 12 aa, Artificial Sequence
  Description of Artificial Sequence: Synthetic peptide
  N-term H or Acetyl
  MOD_RES (2)..(2): Modified Cys
  MOD_RES (4)..(4): Tyr or Phospho-Tyr
  MOD_RES (5)..(5): Leu or Nle (i.e. isomer of Leucine)
  See specification as filed for detailed description of substitutions and preferred embodiments
RCDYLGMQIGKK

SEQ ID NO: 5804 - protein, 12 aa, Artificial Sequence
  Description of Artificial Sequence: Synthetic peptide
  N-term H or Acetyl
  MOD_RES (2)..(2): Modified Cys
  MOD_RES (4)..(4): Tyr or Phospho-Tyr
  MOD_RES (5)..(5): Leu or Nle (i.e. isomer of Leucine)
  See specification as filed for detailed description of substitutions and preferred embodiments
RCDYLHMQIGKK

SEQ ID NO: 5805 - protein, 12 aa, Artificial Sequence
  Description of Artificial Sequence: Synthetic peptide
  N-term H or Acetyl
  MOD_RES (2)..(2): Modified Cys
  MOD_RES (4)..(4): Tyr or Phospho-Tyr
  MOD_RES (5)..(5): Leu or Nle (i.e. isomer of Leucine)
  See specification as filed for detailed description of substitutions and preferred embodiments
RCDYLIMQIGKK

SEQ ID NO: 5806 - protein, 12 aa, Artificial Sequence
  Description of Artificial Sequence: Synthetic peptide
  N-term H or Acetyl
  MOD_RES (2)..(2): Modified Cys
  MOD_RES (4)..(4): Tyr or Phospho-Tyr
  MOD_RES (5)..(5): Leu or Nle (i.e. isomer of Leucine)
  See specification as filed for detailed description of substitutions and preferred embodiments
RCDYLKMQIGKK

SEQ ID NO: 5807 - protein, 12 aa, Artificial Sequence
  Description of Artificial Sequence: Synthetic peptide
  N-term H or Acetyl
  MOD_RES (2)..(2): Modified Cys
  MOD_RES (4)..(4): Tyr or Phospho-Tyr
  MOD_RES (5)..(5): Leu or Nle (i.e. isomer of Leucine)
  See specification as filed for detailed description of substitutions and preferred embodiments
RCDYLLMQIGKK

SEQ ID NO: 5808 - protein, 12 aa, Artificial Sequence
  Description of Artificial Sequence: Synthetic peptide
  N-term H or Acetyl
  MOD_RES (2)..(2): Modified Cys
  MOD_RES (4)..(4): Tyr or Phospho-Tyr
  MOD_RES (5)..(5): Leu or Nle (i.e. isomer of Leucine)
  See specification as filed for detailed description of substitutions and preferred embodiments
RCDYLNMQIGKK

SEQ ID NO: 5809 - protein, 12 aa, Artificial Sequence
  Description of Artificial Sequence: Synthetic peptide
  N-term H or Acetyl
  MOD_RES (2)..(2): Modified Cys
  MOD_RES (4)..(4): Tyr or Phospho-Tyr
  MOD_RES (5)..(5): Leu or Nle (i.e. isomer of Leucine)
  See specification as filed for detailed description of substitutions and preferred embodiments
RCDYLPMQIGKK

SEQ ID NO: 5810 - protein, 12 aa, Artificial Sequence
  Description of Artificial Sequence: Synthetic peptide
  N-term H or Acetyl
  MOD_RES (2)..(2): Modified Cys
  MOD_RES (4)..(4): Tyr or Phospho-Tyr
  MOD_RES (5)..(5): Leu or Nle (i.e. isomer of Leucine)
  See specification as filed for detailed description of substitutions and preferred embodiments
RCDYLQMQIGKK

SEQ ID NO: 5811 - protein, 12 aa, Artificial Sequence
  Description of Artificial Sequence: Synthetic peptide
  N-term H or Acetyl
  MOD_RES (2)..(2): Modified Cys
  MOD_RES (4)..(4): Tyr or Phospho-Tyr
  MOD_RES (5)..(5): Leu or Nle (i.e. isomer of Leucine)
  See specification as filed for detailed description of substitutions and preferred embodiments
RCDYLRMQIGKK

SEQ ID NO: 5812 - protein, 12 aa, Artificial Sequence
  Description of Artificial Sequence: Synthetic peptide
  N-term H or Acetyl
  MOD_RES (2)..(2): Modified Cys
  MOD_RES (4)..(4): Tyr or Phospho-Tyr
  MOD_RES (5)..(5): Leu or Nle (i.e. isomer of Leucine)
  MOD_RES (7)..(7): Leu or Nle (i.e. isomer of Leucine)
  See specification as filed for detailed description of substitutions and preferred embodiments
RCDYLTLQIGKK

SEQ ID NO: 5813 - protein, 12 aa, Artificial Sequence
  Description of Artificial Sequence: Synthetic peptide
  N-term H or Acetyl
  MOD_RES (2)..(2): Modified Cys
  MOD_RES (4)..(4): Tyr or Phospho-Tyr
  MOD_RES (5)..(5): Leu or Nle (i.e. isomer of Leucine)
  See specification as filed for detailed description of substitutions and preferred embodiments
RCDYLTAQIGKK

SEQ ID NO: 5814 - protein, 12 aa, Artificial Sequence
  Description of Artificial Sequence: Synthetic peptide
  N-term H or Acetyl
  MOD_RES (2)..(2): Modified Cys
  MOD_RES (4)..(4): Tyr or Phospho-Tyr
  MOD_RES (5)..(5): Leu or Nle (i.e. isomer of Leucine)
  See specification as filed for detailed description of substitutions and preferred embodiments
RCDYLTDQIGKK

SEQ ID NO: 5815 - protein, 12 aa, Artificial Sequence
  Description of Artificial Sequence: Synthetic peptide
  N-term H or Acetyl
  MOD_RES (2)..(2): Modified Cys
  MOD_RES (4)..(4): Tyr or Phospho-Tyr
  MOD_RES (5)..(5): Leu or Nle (i.e. isomer of Leucine)
  See specification as filed for detailed description of substitutions and preferred embodiments
RCDYLTEQIGKK

SEQ ID NO: 5816 - protein, 12 aa, Artificial Sequence
  Description of Artificial Sequence: Synthetic peptide
  N-term H or Acetyl
  MOD_RES (2)..(2): Modified Cys
  MOD_RES (4)..(4): Tyr or Phospho-Tyr
  MOD_RES (5)..(5): Leu or Nle (i.e. isomer of Leucine)
  See specification as filed for detailed description of substitutions and preferred embodiments
RCDYLTFQIGKK

SEQ ID NO: 5817 - protein, 12 aa, Artificial Sequence
  Description of Artificial Sequence: Synthetic peptide
  N-term H or Acetyl
  MOD_RES (2)..(2): Modified Cys
  MOD_RES (4)..(4): Tyr or Phospho-Tyr
  MOD_RES (5)..(5): Leu or Nle (i.e. isomer of Leucine)
  See specification as filed for detailed description of substitutions and preferred embodiments
RCDYLTGQIGKK

SEQ ID NO: 5818 - protein, 12 aa, Artificial Sequence
  Description of Artificial Sequence: Synthetic peptide
  N-term H or Acetyl
  MOD_RES (2)..(2): Modified Cys
  MOD_RES (4)..(4): Tyr or Phospho-Tyr
  MOD_RES (5)..(5): Leu or Nle (i.e. isomer of Leucine)
  See specification as filed for detailed description of substitutions and preferred embodiments
RCDYLTHQIGKK

SEQ ID NO: 5819 - protein, 12 aa, Artificial Sequence
  Description of Artificial Sequence: Synthetic peptide
  N-term H or Acetyl
  MOD_RES (2)..(2): Modified Cys
  MOD_RES (4)..(4): Tyr or Phospho-Tyr
  MOD_RES (5)..(5): Leu or Nle (i.e. isomer of Leucine)
  See specification as filed for detailed description of substitutions and preferred embodiments
RCDYLTIQIGKK

SEQ ID NO: 5820 - protein, 12 aa, Artificial Sequence
  Description of Artificial Sequence: Synthetic peptide
  N-term H or Acetyl
  MOD_RES (2)..(2): Modified Cys
  MOD_RES (4)..(4): Tyr or Phospho-Tyr
  MOD_RES (5)..(5): Leu or Nle (i.e. isomer of Leucine)
  See specification as filed for detailed description of substitutions and preferred embodiments
RCDYLTKQIGKK

SEQ ID NO: 5821 - protein, 12 aa, Artificial Sequence
  Description of Artificial Sequence: Synthetic peptide
  N-term H or Acetyl
  MOD_RES (2)..(2): Modified Cys
  MOD_RES (4)..(4): Tyr or Phospho-Tyr
  MOD_RES (5)..(5): Leu or Nle (i.e. isomer of Leucine)
  See specification as filed for detailed description of substitutions and preferred embodiments
RCDYLTLQIGKK

SEQ ID NO: 5822 - protein, 12 aa, Artificial Sequence
  Description of Artificial Sequence: Synthetic peptide
  N-term H or Acetyl
  MOD_RES (2)..(2): Modified Cys
  MOD_RES (4)..(4): Tyr or Phospho-Tyr
  MOD_RES (5)..(5): Leu or Nle (i.e. isomer of Leucine)
  MOD_RES (8)..(8): Leu or Nle (i.e. isomer of Leucine)
  See specification as filed for detailed description of substitutions and preferred embodiments
RCDYLTMLIGKK

SEQ ID NO: 5823 - protein, 12 aa, Artificial Sequence
  Description of Artificial Sequence: Synthetic peptide
  N-term H or Acetyl
  MOD_RES (2)..(2): Modified Cys
  MOD_RES (4)..(4): Tyr or Phospho-Tyr
  MOD_RES (5)..(5): Leu or Nle (i.e. isomer of Leucine)
  See specification as filed for detailed description of substitutions and preferred embodiments
RCDYLTMAIGKK

SEQ ID NO: 5824 - protein, 12 aa, Artificial Sequence
  Description of Artificial Sequence: Synthetic peptide
  N-term H or Acetyl
  MOD_RES (2)..(2): Modified Cys
  MOD_RES (4)..(4): Tyr or Phospho-Tyr
  MOD_RES (5)..(5): Leu or Nle (i.e. isomer of Leucine)
  See specification as filed for detailed description of substitutions and preferred embodiments
RCDYLTMDIGKK

SEQ ID NO: 5825 - protein, 12 aa, Artificial Sequence
  Description of Artificial Sequence: Synthetic peptide
  N-term H or Acetyl
  MOD_RES (2)..(2): Modified Cys
  MOD_RES (4)..(4): Tyr or Phospho-Tyr
  MOD_RES (5)..(5): Leu or Nle (i.e. isomer of Leucine)
  See specification as filed for detailed description of substitutions and preferred embodiments
RCDYLTMEIGKK

SEQ ID NO: 5826 - protein, 12 aa, Artificial Sequence
  Description of Artificial Sequence: Synthetic peptide
  N-term H or Acetyl
  MOD_RES (2)..(2): Modified Cys
  MOD_RES (4)..(4): Tyr or Phospho-Tyr
  MOD_RES (5)..(5): Leu or Nle (i.e. isomer of Leucine)
  See specification as filed for detailed description of substitutions and preferred embodiments
RCDYLTMFIGKK

SEQ ID NO: 5827 - protein, 12 aa, Artificial Sequence
  Description of Artificial Sequence: Synthetic peptide
  N-term H or Acetyl
  MOD_RES (2)..(2): Modified Cys
  MOD_RES (4)..(4): Tyr or Phospho-Tyr
  MOD_RES (5)..(5): Leu or Nle (i.e. isomer of Leucine)
  See specification as filed for detailed description of substitutions and preferred embodiments
RCDYLTMGIGKK

SEQ ID NO: 5828 - protein, 12 aa, Artificial Sequence
  Description of Artificial Sequence: Synthetic peptide
  N-term H or Acetyl
  MOD_RES (2)..(2): Modified Cys
  MOD_RES (4)..(4): Tyr or Phospho-Tyr
  MOD_RES (5)..(5): Leu or Nle (i.e. isomer of Leucine)
  See specification as filed for detailed description of substitutions and preferred embodiments
RCDYLTMHIGKK

SEQ ID NO: 5829 - protein, 12 aa, Artificial Sequence
  Description of Artificial Sequence: Synthetic peptide
  N-term H or Acetyl
  MOD_RES (2)..(2): Modified Cys
  MOD_RES (4)..(4): Tyr or Phospho-Tyr
  MOD_RES (5)..(5): Leu or Nle (i.e. isomer of Leucine)
  See specification as filed for detailed description of substitutions and preferred embodiments
RCDYLTMIIGKK

SEQ ID NO: 5830 - protein, 12 aa, Artificial Sequence
  Description of Artificial Sequence: Synthetic peptide
  N-term H or Acetyl
  MOD_RES (2)..(2): Modified Cys
  MOD_RES (4)..(4): Tyr or Phospho-Tyr
  MOD_RES (5)..(5): Leu or Nle (i.e. isomer of Leucine)
  See specification as filed for detailed description of substitutions and preferred embodiments
RCDYLTMKIGKK

SEQ ID NO: 5831 - protein, 12 aa, Artificial Sequence
  Description of Artificial Sequence: Synthetic peptide
  N-term H or Acetyl
  MOD_RES (2)..(2): Modified Cys
  MOD_RES (4)..(4): Tyr or Phospho-Tyr
  MOD_RES (5)..(5): Leu or Nle (i.e. isomer of Leucine)
  See specification as filed for detailed description of substitutions and preferred embodiments
RCDYLTMLIGKK

SEQ ID NO: 5832 - protein, 12 aa, Artificial Sequence
  Description of Artificial Sequence: Synthetic peptide
  N-term H or Acetyl
  MOD_RES (2)..(2): Modified Cys
  MOD_RES (4)..(4): Tyr or Phospho-Tyr
  MOD_RES (5)..(5): Leu or Nle (i.e. isomer of Leucine)
  See specification as filed for detailed description of substitutions and preferred embodiments
RCDYLTMNIGKK

SEQ ID NO: 5833 - protein, 12 aa, Artificial Sequence
  Description of Artificial Sequence: Synthetic peptide
  N-term H or Acetyl
  MOD_RES (2)..(2): Modified Cys
  MOD_RES (4)..(4): Tyr or Phospho-Tyr
  MOD_RES (5)..(5): Leu or Nle (i.e. isomer of Leucine)
  See specification as filed for detailed description of substitutions and preferred embodiments
RCDYLTMPIGKK

SEQ ID NO: 5834 - protein, 12 aa, Artificial Sequence
  Description of Artificial Sequence: Synthetic peptide
  N-term H or Acetyl
  MOD_RES (2)..(2): Modified Cys
  MOD_RES (4)..(4): Tyr or Phospho-Tyr
  MOD_RES (5)..(5): Leu or Nle (i.e. isomer of Leucine)
  MOD_RES (9)..(9): Leu or Nle (i.e. isomer of Leucine)
  See specification as filed for detailed description of substitutions and preferred embodiments
RCDYLTMQLGKK

SEQ ID NO: 5835 - protein, 12 aa, Artificial Sequence
  Description of Artificial Sequence: Synthetic peptide
  N-term H or Acetyl
  MOD_RES (2)..(2): Modified Cys
  MOD_RES (4)..(4): Tyr or Phospho-Tyr
  MOD_RES (5)..(5): Leu or Nle (i.e. isomer of Leucine)
  See specification as filed for detailed description of substitutions and preferred embodiments
RCDYLTMQAGKK

SEQ ID NO: 5836 - protein, 12 aa, Artificial Sequence
  Description of Artificial Sequence: Synthetic peptide
  N-term H or Acetyl
  MOD_RES (2)..(2): Modified Cys
  MOD_RES (4)..(4): Tyr or Phospho-Tyr
  MOD_RES (5)..(5): Leu or Nle (i.e. isomer of Leucine)
  See specification as filed for detailed description of substitutions and preferred embodiments
RCDYLTMQDGKK

SEQ ID NO: 5837 - protein, 12 aa, Artificial Sequence
  Description of Artificial Sequence: Synthetic peptide
  N-term H or Acetyl
  MOD_RES (2)..(2): Modified Cys
  MOD_RES (4)..(4): Tyr or Phospho-Tyr
  MOD_RES (5)..(5): Leu or Nle (i.e. isomer of Leucine)
  See specification as filed for detailed description of substitutions and preferred embodiments
RCDYLTMQEGKK

SEQ ID NO: 5838 - protein, 12 aa, Artificial Sequence
  Description of Artificial Sequence: Synthetic peptide
  N-term H or Acetyl
  MOD_RES (2)..(2): Modified Cys
  MOD_RES (4)..(4): Tyr or Phospho-Tyr
  MOD_RES (5)..(5): Leu or Nle (i.e. isomer of Leucine)
  See specification as filed for detailed description of substitutions and preferred embodiments
RCDYLTMQFGKK

SEQ ID NO: 5839 - protein, 12 aa, Artificial Sequence
  Description of Artificial Sequence: Synthetic peptide
  N-term H or Acetyl
  MOD_RES (2)..(2): Modified Cys
  MOD_RES (4)..(4): Tyr or Phospho-Tyr
  MOD_RES (5)..(5): Leu or Nle (i.e. isomer of Leucine)
  See specification as filed for detailed description of substitutions and preferred embodiments
RCDYLTMQGGKK

SEQ ID NO: 5840 - protein, 12 aa, Artificial Sequence
  Description of Artificial Sequence: Synthetic peptide
  N-term H or Acetyl
  MOD_RES (2)..(2): Modified Cys
  MOD_RES (4)..(4): Tyr or Phospho-Tyr
  MOD_RES (5)..(5): Leu or Nle (i.e. isomer of Leucine)
  See specification as filed for detailed description of substitutions and preferred embodiments
RCDYLTMQHGKK

SEQ ID NO: 5841 - protein, 12 aa, Artificial Sequence
  Description of Artificial Sequence: Synthetic peptide
  N-term H or Acetyl
  MOD_RES (2)..(2): Modified Cys
  MOD_RES (4)..(4): Tyr or Phospho-Tyr
  MOD_RES (5)..(5): Leu or Nle (i.e. isomer of Leucine)
  MOD_RES (10)..(10): Leu or Nle (i.e. isomer of Leucine)
  See specification as filed for detailed description of substitutions and preferred embodiments
RCDYLTMQILKK

SEQ ID NO: 5842 - protein, 12 aa, Artificial Sequence
  Description of Artificial Sequence: Synthetic peptide
  N-term H or Acetyl
  MOD_RES (2)..(2): Modified Cys
  MOD_RES (4)..(4): Tyr or Phospho-Tyr
  MOD_RES (5)..(5): Leu or Nle (i.e. isomer of Leucine)
  See specification as filed for detailed description of substitutions and preferred embodiments
RCDYLTMQIAKK

SEQ ID NO: 5843 - protein, 12 aa, Artificial Sequence
  Description of Artificial Sequence: Synthetic peptide
  N-term H or Acetyl
  MOD_RES (2)..(2): Modified Cys
  MOD_RES (4)..(4): Tyr or Phospho-Tyr
  MOD_RES (5)..(5): Leu or Nle (i.e. isomer of Leucine)
  See specification as filed for detailed description of substitutions and preferred embodiments
RCDYLTMQIDKK

SEQ ID NO: 5844 - protein, 12 aa, Artificial Sequence
  Description of Artificial Sequence: Synthetic peptide
  N-term H or Acetyl
  MOD_RES (2)..(2): Modified Cys
  MOD_RES (4)..(4): Tyr or Phospho-Tyr
  MOD_RES (5)..(5): Leu or Nle (i.e. isomer of Leucine)
  See specification as filed for detailed description of substitutions and preferred embodiments
RCDYLTMQIEKK

SEQ ID NO: 5845 - protein, 12 aa, Artificial Sequence
  Description of Artificial Sequence: Synthetic peptide
  N-term H or Acetyl
  MOD_RES (2)..(2): Modified Cys
  MOD_RES (4)..(4): Tyr or Phospho-Tyr
  MOD_RES (5)..(5): Leu or Nle (i.e. isomer of Leucine)
  See specification as filed for detailed description of substitutions and preferred embodiments
RCDYLTMQIFKK

SEQ ID NO: 5846 - protein, 12 aa, Artificial Sequence
  Description of Artificial Sequence: Synthetic peptide
  N-term H or Acetyl
  MOD_RES (2)..(2): Modified Cys
  MOD_RES (4)..(4): Tyr or Phospho-Tyr
  MOD_RES (5)..(5): Leu or Nle (i.e. isomer of Leucine)
  MOD_RES (11)..(11): Leu or Nle (i.e. isomer of Leucine)
  See specification as filed for detailed description of substitutions and preferred embodiments
RCDYLTMQIGLK

SEQ ID NO: 5847 - protein, 12 aa, Artificial Sequence
  Description of Artificial Sequence: Synthetic peptide
  N-term H or Acetyl
  MOD_RES (2)..(2): Modified Cys
  MOD_RES (4)..(4): Tyr or Phospho-Tyr
  MOD_RES (5)..(5): Leu or Nle (i.e. isomer of Leucine)
  See specification as filed for detailed description of substitutions and preferred embodiments
RCDYLTMQIGAK

SEQ ID NO: 5848 - protein, 12 aa, Artificial Sequence
  Description of Artificial Sequence: Synthetic peptide
  N-term H or Acetyl
  MOD_RES (2)..(2): Modified Cys
  MOD_RES (4)..(4): Tyr or Phospho-Tyr
  MOD_RES (5)..(5): Leu or Nle (i.e. isomer of Leucine)
  See specification as filed for detailed description of substitutions and preferred embodiments
RCDYLTMQIGDK

SEQ ID NO: 5849 - protein, 12 aa, Artificial Sequence
  Description of Artificial Sequence: Synthetic peptide
  N-term H or Acetyl
  MOD_RES (2)..(2): Modified Cys
  MOD_RES (4)..(4): Tyr or Phospho-Tyr
  MOD_RES (5)..(5): Leu or Nle (i.e. isomer of Leucine)
  See specification as filed for detailed description of substitutions and preferred embodiments
RCDYLTMQIGEK

SEQ ID NO: 5850 - protein, 12 aa, Artificial Sequence
  Description of Artificial Sequence: Synthetic peptide
  N-term H or Acetyl
  MOD_RES (2)..(2): Modified Cys
  MOD_RES (4)..(4): Tyr or Phospho-Tyr
  MOD_RES (5)..(5): Leu or Nle (i.e. isomer of Leucine)
  See specification as filed for detailed description of substitutions and preferred embodiments
RCDYLTMQIGFK

SEQ ID NO: 5851 - protein, 12 aa, Artificial Sequence
  Description of Artificial Sequence: Synthetic peptide
  N-term H or Acetyl
  MOD_RES (2)..(2): Modified Cys
  MOD_RES (4)..(4): Tyr or Phospho-Tyr
  MOD_RES (5)..(5): Leu or Nle (i.e. isomer of Leucine)
  See specification as filed for detailed description of substitutions and preferred embodiments
RCDYLTMQIGGK

SEQ ID NO: 5852 - protein, 12 aa, Artificial Sequence
  Description of Artificial Sequence: Synthetic peptide
  N-term H or Acetyl
  MOD_RES (2)..(2): Modified Cys
  MOD_RES (4)..(4): Tyr or Phospho-Tyr
  MOD_RES (5)..(5): Leu or Nle (i.e. isomer of Leucine)
  See specification as filed for detailed description of substitutions and preferred embodiments
RCDYLTMQIGHK

SEQ ID NO: 5853 - protein, 12 aa, Artificial Sequence
  Description of Artificial Sequence: Synthetic peptide
  N-term H or Acetyl
  MOD_RES (2)..(2): Modified Cys
  MOD_RES (4)..(4): Tyr or Phospho-Tyr
  MOD_RES (5)..(5): Leu or Nle (i.e. isomer of Leucine)
  See specification as filed for detailed description of substitutions and preferred embodiments
RCDYLTMQIGIK

SEQ ID NO: 5854 - protein, 12 aa, Artificial Sequence
  Description of Artificial Sequence: Synthetic peptide
  N-term H or Acetyl
  MOD_RES (2)..(2): Modified Cys
  MOD_RES (4)..(4): Tyr or Phospho-Tyr
  MOD_RES (5)..(5): Leu or Nle (i.e. isomer of Leucine)
  MOD_RES (12)..(12): Leu or Nle (i.e. isomer of Leucine)
  See specification as filed for detailed description of substitutions and preferred embodiments
RCDYLTMQIGKL

SEQ ID NO: 5855 - protein, 12 aa, Artificial Sequence
  Description of Artificial Sequence: Synthetic peptide
  N-term H or Acetyl
  MOD_RES (2)..(2): Modified Cys
  MOD_RES (4)..(4): Tyr or Phospho-Tyr
  MOD_RES (5)..(5): Leu or Nle (i.e. isomer of Leucine)
  See specification as filed for detailed description of substitutions and preferred embodiments
RCDYLTMQIGKA

SEQ ID NO: 5856 - protein, 12 aa, Artificial Sequence
  Description of Artificial Sequence: Synthetic peptide
  N-term H or Acetyl
  MOD_RES (2)..(2): Modified Cys
  MOD_RES (4)..(4): Tyr or Phospho-Tyr
  MOD_RES (5)..(5): Leu or Nle (i.e. isomer of Leucine)
  See specification as filed for detailed description of substitutions and preferred embodiments
RCDYLTMQIGKD

SEQ ID NO: 5857 - protein, 12 aa, Artificial Sequence
  Description of Artificial Sequence: Synthetic peptide
  N-term H or Acetyl
  MOD_RES (2)..(2): Modified Cys
  MOD_RES (4)..(4): Tyr or Phospho-Tyr
  MOD_RES (5)..(5): Leu or Nle (i.e. isomer of Leucine)
  See specification as filed for detailed description of substitutions and preferred embodiments
RCDYLTMQIGKE

SEQ ID NO: 5858 - protein, 12 aa, Artificial Sequence
  Description of Artificial Sequence: Synthetic peptide
  N-term H or Acetyl
  MOD_RES (2)..(2): Modified Cys
  MOD_RES (4)..(4): Tyr or Phospho-Tyr
  MOD_RES (5)..(5): Leu or Nle (i.e. isomer of Leucine)
  See specification as filed for detailed description of substitutions and preferred embodiments
RCDYLTMQIGKF

SEQ ID NO: 5859 - protein, 12 aa, Artificial Sequence
  Description of Artificial Sequence: Synthetic peptide
  N-term H or Acetyl
  MOD_RES (2)..(2): Modified Cys
  MOD_RES (4)..(4): Tyr or Phospho-Tyr
  MOD_RES (5)..(5): Leu or Nle (i.e. isomer of Leucine)
  See specification as filed for detailed description of substitutions and preferred embodiments
RCDYLTMQIGKG

SEQ ID NO: 5860 - protein, 12 aa, Artificial Sequence
  Description of Artificial Sequence: Synthetic peptide
  N-term H or Acetyl
  MOD_RES (2)..(2): Modified Cys
  MOD_RES (4)..(4): Tyr or Phospho-Tyr
  MOD_RES (5)..(5): Leu or Nle (i.e. isomer of Leucine)
  See specification as filed for detailed description of substitutions and preferred embodiments
RCDYLTMQIGKH

SEQ ID NO: 5861 - protein, 12 aa, Artificial Sequence
  Description of Artificial Sequence: Synthetic peptide
  N-term H or Acetyl
  MOD_RES (2)..(2): Modified Cys
  MOD_RES (4)..(4): Tyr or Phospho-Tyr
  MOD_RES (5)..(5): Leu or Nle (i.e. isomer of Leucine)
  See specification as filed for detailed description of substitutions and preferred embodiments
RCDYLTMQIGKI

SEQ ID NO: 5862 - protein, 12 aa, Artificial Sequence
  Description of Artificial Sequence: Synthetic peptide
  N-term H or Acetyl
  MOD_RES (2)..(2): Modified Cys
  MOD_RES (4)..(4): Tyr or Phospho-Tyr
  MOD_RES (5)..(5): Leu or Nle (i.e. isomer of Leucine)
  See specification as filed for detailed description of substitutions and preferred embodiments
RCDYLTMQIGKL

SEQ ID NO: 5863 - protein, 12 aa, Artificial Sequence
  Description of Artificial Sequence: Synthetic peptide
  N-term H or Acetyl
  MOD_RES (2)..(2): Modified Cys
  MOD_RES (4)..(4): Tyr or Phospho-Tyr
  MOD_RES (5)..(5): Leu or Nle (i.e. isomer of Leucine)
  See specification as filed for detailed description of substitutions and preferred embodiments
RCDYLTMQIGKN

SEQ ID NO: 5864 - protein, 12 aa, Artificial Sequence
  Description of Artificial Sequence: Synthetic peptide
  N-term H or Acetyl
  MOD_RES (2)..(2): Modified Cys
  MOD_RES (4)..(4): Tyr or Phospho-Tyr
  MOD_RES (5)..(5): Leu or Nle (i.e. isomer of Leucine)
  See specification as filed for detailed description of substitutions and preferred embodiments
RCDYLTMQIGKP

SEQ ID NO: 5865 - protein, 12 aa, Artificial Sequence
  Description of Artificial Sequence: Synthetic peptide
  N-term H or Acetyl
  MOD_RES (2)..(2): Modified Cys
  MOD_RES (4)..(4): Tyr or Phospho-Tyr
  MOD_RES (5)..(5): Leu or Nle (i.e. isomer of Leucine)
  See specification as filed for detailed description of substitutions and preferred embodiments
RCDYLTMQIGKQ

SEQ ID NO: 5866 - protein, 12 aa, Artificial Sequence
  Description of Artificial Sequence: Synthetic peptide
  N-term H or Acetyl
  MOD_RES (2)..(2): Modified Cys
  MOD_RES (4)..(4): Tyr or Phospho-Tyr
  MOD_RES (5)..(5): Leu or Nle (i.e. isomer of Leucine)
  See specification as filed for detailed description of substitutions and preferred embodiments
RCDYLTMQIGKR

SEQ ID NO: 5867 - protein, 12 aa, Artificial Sequence
  Description of Artificial Sequence: Synthetic peptide
  N-term H or Acetyl
  MOD_RES (2)..(2): Modified Cys
  MOD_RES (4)..(4): Tyr or Phospho-Tyr
  MOD_RES (5)..(5): Leu or Nle (i.e. isomer of Leucine)
  See specification as filed for detailed description of substitutions and preferred embodiments
RCDYLTMQIGKV

SEQ ID NO: 5868 - protein, 12 aa, Artificial Sequence
  Description of Artificial Sequence: Synthetic peptide
  N-term H or Acetyl
  MOD_RES (2)..(2): Modified Cys
  MOD_RES (4)..(4): Tyr or Phospho-Tyr
  MOD_RES (5)..(5): Leu or Nle (i.e. isomer of Leucine)
  See specification as filed for detailed description of substitutions and preferred embodiments
RCDYLTMQIGKW

SEQ ID NO: 5869 - protein, 12 aa, Artificial Sequence
  Description of Artificial Sequence: Synthetic peptide
  N-term H or Acetyl
  MOD_RES (2)..(2): Modified Cys
  MOD_RES (4)..(4): Tyr or Phospho-Tyr
  MOD_RES (5)..(5): Leu or Nle (i.e. isomer of Leucine)
  See specification as filed for detailed description of substitutions and preferred embodiments
RCDYLTMQIGLK

SEQ ID NO: 5870 - protein, 12 aa, Artificial Sequence
  Description of Artificial Sequence: Synthetic peptide
  N-term H or Acetyl
  MOD_RES (2)..(2): Modified Cys
  MOD_RES (4)..(4): Tyr or Phospho-Tyr
  MOD_RES (5)..(5): Leu or Nle (i.e. isomer of Leucine)
  See specification as filed for detailed description of substitutions and preferred embodiments
RCDYLTMQIGNK

SEQ ID NO: 5871 - protein, 12 aa, Artificial Sequence
  Description of Artificial Sequence: Synthetic peptide
  N-term H or Acetyl
  MOD_RES (2)..(2): Modified Cys
  MOD_RES (4)..(4): Tyr or Phospho-Tyr
  MOD_RES (5)..(5): Leu or Nle (i.e. isomer of Leucine)
  See specification as filed for detailed description of substitutions and preferred embodiments
RCDYLTMQIGPK

SEQ ID NO: 5872 - protein, 12 aa, Artificial Sequence
  Description of Artificial Sequence: Synthetic peptide
  N-term H or Acetyl
  MOD_RES (2)..(2): Modified Cys
  MOD_RES (4)..(4): Tyr or Phospho-Tyr
  MOD_RES (5)..(5): Leu or Nle (i.e. isomer of Leucine)
  See specification as filed for detailed description of substitutions and preferred embodiments
RCDYLTMQIGQK

SEQ ID NO: 5873 - protein, 12 aa, Artificial Sequence
  Description of Artificial Sequence: Synthetic peptide
  N-term H or Acetyl
  MOD_RES (2)..(2): Modified Cys
  MOD_RES (4)..(4): Tyr or Phospho-Tyr
  MOD_RES (5)..(5): Leu or Nle (i.e. isomer of Leucine)
  See specification as filed for detailed description of substitutions and preferred embodiments
RCDYLTMQIGRK

SEQ ID NO: 5874 - protein, 12 aa, Artificial Sequence
  Description of Artificial Sequence: Synthetic peptide
  N-term H or Acetyl
  MOD_RES (2)..(2): Modified Cys
  MOD_RES (4)..(4): Tyr or Phospho-Tyr
  MOD_RES (5)..(5): Leu or Nle (i.e. isomer of Leucine)
  See specification as filed for detailed description of substitutions and preferred embodiments
RCDYLTMQIGVK

SEQ ID NO: 5875 - protein, 12 aa, Artificial Sequence
  Description of Artificial Sequence: Synthetic peptide
  N-term H or Acetyl
  MOD_RES (2)..(2): Modified Cys
  MOD_RES (4)..(4): Tyr or Phospho-Tyr
  MOD_RES (5)..(5): Leu or Nle (i.e. isomer of Leucine)
  See specification as filed for detailed description of substitutions and preferred embodiments
RCDYLTMQIGWK

SEQ ID NO: 5876 - protein, 12 aa, Artificial Sequence
  Description of Artificial Sequence: Synthetic peptide
  N-term H or Acetyl
  MOD_RES (2)..(2): Modified Cys
  MOD_RES (4)..(4): Tyr or Phospho-Tyr
  MOD_RES (5)..(5): Leu or Nle (i.e. isomer of Leucine)
  See specification as filed for detailed description of substitutions and preferred embodiments
RCDYLTMQIHKK

SEQ ID NO: 5877 - protein, 12 aa, Artificial Sequence
  Description of Artificial Sequence: Synthetic peptide
  N-term H or Acetyl
  MOD_RES (2)..(2): Modified Cys
  MOD_RES (4)..(4): Tyr or Phospho-Tyr
  MOD_RES (5)..(5): Leu or Nle (i.e. isomer of Leucine)
  See specification as filed for detailed description of substitutions and preferred embodiments
RCDYLTMQIIKK

SEQ ID NO: 5878 - protein, 12 aa, Artificial Sequence
  Description of Artificial Sequence: Synthetic peptide
  N-term H or Acetyl
  MOD_RES (2)..(2): Modified Cys
  MOD_RES (4)..(4): Tyr or Phospho-Tyr
  MOD_RES (5)..(5): Leu or Nle (i.e. isomer of Leucine)
  See specification as filed for detailed description of substitutions and preferred embodiments
RCDYLTMQIKKK

SEQ ID NO: 5879 - protein, 12 aa, Artificial Sequence
  Description of Artificial Sequence: Synthetic peptide
  N-term H or Acetyl
  MOD_RES (2)..(2): Modified Cys
  MOD_RES (4)..(4): Tyr or Phospho-Tyr
  MOD_RES (5)..(5): Leu or Nle (i.e. isomer of Leucine)
  See specification as filed for detailed description of substitutions and preferred embodiments
RCDYLTMQILKK

SEQ ID NO: 5880 - protein, 12 aa, Artificial Sequence
  Description of Artificial Sequence: Synthetic peptide
  N-term H or Acetyl
  MOD_RES (2)..(2): Modified Cys
  MOD_RES (4)..(4): Tyr or Phospho-Tyr
  MOD_RES (5)..(5): Leu or Nle (i.e. isomer of Leucine)
  See specification as filed for detailed description of substitutions and preferred embodiments
RCDYLTMQINKK

SEQ ID NO: 5881 - protein, 12 aa, Artificial Sequence
  Description of Artificial Sequence: Synthetic peptide
  N-term H or Acetyl
  MOD_RES (2)..(2): Modified Cys
  MOD_RES (4)..(4): Tyr or Phospho-Tyr
  MOD_RES (5)..(5): Leu or Nle (i.e. isomer of Leucine)
  See specification as filed for detailed description of substitutions and preferred embodiments
RCDYLTMQIPKK

SEQ ID NO: 5882 - protein, 12 aa, Artificial Sequence
  Description of Artificial Sequence: Synthetic peptide
  N-term H or Acetyl
  MOD_RES (2)..(2): Modified Cys
  MOD_RES (4)..(4): Tyr or Phospho-Tyr
  MOD_RES (5)..(5): Leu or Nle (i.e. isomer of Leucine)
  See specification as filed for detailed description of substitutions and preferred embodiments
RCDYLTMQIQKK

SEQ ID NO: 5883 - protein, 12 aa, Artificial Sequence
  Description of Artificial Sequence: Synthetic peptide
  N-term H or Acetyl
  MOD_RES (2)..(2): Modified Cys
  MOD_RES (4)..(4): Tyr or Phospho-Tyr
  MOD_RES (5)..(5): Leu or Nle (i.e. isomer of Leucine)
  See specification as filed for detailed description of substitutions and preferred embodiments
RCDYLTMQIRKK

SEQ ID NO: 5884 - protein, 12 aa, Artificial Sequence
  Description of Artificial Sequence: Synthetic peptide
  N-term H or Acetyl
  MOD_RES (2)..(2): Modified Cys
  MOD_RES (4)..(4): Tyr or Phospho-Tyr
  MOD_RES (5)..(5): Leu or Nle (i.e. isomer of Leucine)
  See specification as filed for detailed description of substitutions and preferred embodiments
RCDYLTMQIVKK

SEQ ID NO: 5885 - protein, 12 aa, Artificial Sequence
  Description of Artificial Sequence: Synthetic peptide
  N-term H or Acetyl
  MOD_RES (2)..(2): Modified Cys
  MOD_RES (4)..(4): Tyr or Phospho-Tyr
  MOD_RES (5)..(5): Leu or Nle (i.e. isomer of Leucine)
  See specification as filed for detailed description of substitutions and preferred embodiments
RCDYLTMQIWKK

SEQ ID NO: 5886 - protein, 12 aa, Artificial Sequence
  Description of Artificial Sequence: Synthetic peptide
  N-term H or Acetyl
  MOD_RES (2)..(2): Modified Cys
  MOD_RES (4)..(4): Tyr or Phospho-Tyr
  MOD_RES (5)..(5): Leu or Nle (i.e. isomer of Leucine)
  See specification as filed for detailed description of substitutions and preferred embodiments
RCDYLTMQKGKK

SEQ ID NO: 5887 - protein, 12 aa, Artificial Sequence
  Description of Artificial Sequence: Synthetic peptide
  N-term H or Acetyl
  MOD_RES (2)..(2): Modified Cys
  MOD_RES (4)..(4): Tyr or Phospho-Tyr
  MOD_RES (5)..(5): Leu or Nle (i.e. isomer of Leucine)
  See specification as filed for detailed description of substitutions and preferred embodiments
RCDYLTMQLGKK

SEQ ID NO: 5888 - protein, 12 aa, Artificial Sequence
  Description of Artificial Sequence: Synthetic peptide
  N-term H or Acetyl
  MOD_RES (2)..(2): Modified Cys
  MOD_RES (4)..(4): Tyr or Phospho-Tyr
  MOD_RES (5)..(5): Leu or Nle (i.e. isomer of Leucine)
  See specification as filed for detailed description of substitutions and preferred embodiments
RCDYLTMQNGKK

SEQ ID NO: 5889 - protein, 12 aa, Artificial Sequence
  Description of Artificial Sequence: Synthetic peptide
  N-term H or Acetyl
  MOD_RES (2)..(2): Modified Cys
  MOD_RES (4)..(4): Tyr or Phospho-Tyr
  MOD_RES (5)..(5): Leu or Nle (i.e. isomer of Leucine)
  See specification as filed for detailed description of substitutions and preferred embodiments
RCDYLTMQPGKK

SEQ ID NO: 5890 - protein, 12 aa, Artificial Sequence
  Description of Artificial Sequence: Synthetic peptide
  N-term H or Acetyl
  MOD_RES (2)..(2): Modified Cys
  MOD_RES (4)..(4): Tyr or Phospho-Tyr
  MOD_RES (5)..(5): Leu or Nle (i.e. isomer of Leucine)
  See specification as filed for detailed description of substitutions and preferred embodiments
RCDYLTMQQGKK

SEQ ID NO: 5891 - protein, 12 aa, Artificial Sequence
  Description of Artificial Sequence: Synthetic peptide
  N-term H or Acetyl
  MOD_RES (2)..(2): Modified Cys
  MOD_RES (4)..(4): Tyr or Phospho-Tyr
  MOD_RES (5)..(5): Leu or Nle (i.e. isomer of Leucine)
  See specification as filed for detailed description of substitutions and preferred embodiments
RCDYLTMQRGKK

SEQ ID NO: 5892 - protein, 12 aa, Artificial Sequence
  Description of Artificial Sequence: Synthetic peptide
  N-term H or Acetyl
  MOD_RES (2)..(2): Modified Cys
  MOD_RES (4)..(4): Tyr or Phospho-Tyr
  MOD_RES (5)..(5): Leu or Nle (i.e. isomer of Leucine)
  See specification as filed for detailed description of substitutions and preferred embodiments
RCDYLTMQVGKK

SEQ ID NO: 5893 - protein, 12 aa, Artificial Sequence
  Description of Artificial Sequence: Synthetic peptide
  N-term H or Acetyl
  MOD_RES (2)..(2): Modified Cys
  MOD_RES (4)..(4): Tyr or Phospho-Tyr
  MOD_RES (5)..(5): Leu or Nle (i.e. isomer of Leucine)
  See specification as filed for detailed description of substitutions and preferred embodiments
RCDYLTMQWGKK

SEQ ID NO: 5894 - protein, 12 aa, Artificial Sequence
  Description of Artificial Sequence: Synthetic peptide
  N-term H or Acetyl
  MOD_RES (2)..(2): Modified Cys
  MOD_RES (4)..(4): Tyr or Phospho-Tyr
  MOD_RES (5)..(5): Leu or Nle (i.e. isomer of Leucine)
  See specification as filed for detailed description of substitutions and preferred embodiments
RCDYLTMRIGKK

SEQ ID NO: 5895 - protein, 12 aa, Artificial Sequence
  Description of Artificial Sequence: Synthetic peptide
  N-term H or Acetyl
  MOD_RES (2)..(2): Modified Cys
  MOD_RES (4)..(4): Tyr or Phospho-Tyr
  MOD_RES (5)..(5): Leu or Nle (i.e. isomer of Leucine)
  See specification as filed for detailed description of substitutions and preferred embodiments
RCDYLTMVIGKK

SEQ ID NO: 5896 - protein, 12 aa, Artificial Sequence
  Description of Artificial Sequence: Synthetic peptide
  N-term H or Acetyl
  MOD_RES (2)..(2): Modified Cys
  MOD_RES (4)..(4): Tyr or Phospho-Tyr
  MOD_RES (5)..(5): Leu or Nle (i.e. isomer of Leucine)
  See specification as filed for detailed description of substitutions and preferred embodiments
RCDYLTMWIGKK

SEQ ID NO: 5897 - protein, 12 aa, Artificial Sequence
  Description of Artificial Sequence: Synthetic peptide
  N-term H or Acetyl
  MOD_RES (2)..(2): Modified Cys
  MOD_RES (4)..(4): Tyr or Phospho-Tyr
  MOD_RES (5)..(5): Leu or Nle (i.e. isomer of Leucine)
  See specification as filed for detailed description of substitutions and preferred embodiments
RCDYLTNQIGKK

SEQ ID NO: 5898 - protein, 12 aa, Artificial Sequence
  Description of Artificial Sequence: Synthetic peptide
  N-term H or Acetyl
  MOD_RES (2)..(2): Modified Cys
  MOD_RES (4)..(4): Tyr or Phospho-Tyr
  MOD_RES (5)..(5): Leu or Nle (i.e. isomer of Leucine)
  See specification as filed for detailed description of substitutions and preferred embodiments
RCDYLTPQIGKK

SEQ ID NO: 5899 - protein, 12 aa, Artificial Sequence
  Description of Artificial Sequence: Synthetic peptide
  N-term H or Acetyl
  MOD_RES (2)..(2): Modified Cys
  MOD_RES (4)..(4): Tyr or Phospho-Tyr
  MOD_RES (5)..(5): Leu or Nle (i.e. isomer of Leucine)
  See specification as filed for detailed description of substitutions and preferred embodiments
RCDYLTQQIGKK

SEQ ID NO: 5900 - protein, 12 aa, Artificial Sequence
  Description of Artificial Sequence: Synthetic peptide
  N-term H or Acetyl
  MOD_RES (2)..(2): Modified Cys
  MOD_RES (4)..(4): Tyr or Phospho-Tyr
  MOD_RES (5)..(5): Leu or Nle (i.e. isomer of Leucine)
  See specification as filed for detailed description of substitutions and preferred embodiments
RCDYLTRQIGKK

SEQ ID NO: 5901 - protein, 12 aa, Artificial Sequence
  Description of Artificial Sequence: Synthetic peptide
  N-term H or Acetyl
  MOD_RES (2)..(2): Modified Cys
  MOD_RES (4)..(4): Tyr or Phospho-Tyr
  MOD_RES (5)..(5): Leu or Nle (i.e. isomer of Leucine)
  See specification as filed for detailed description of substitutions and preferred embodiments
RCDYLTVQIGKK

SEQ ID NO: 5902 - protein, 12 aa, Artificial Sequence
  Description of Artificial Sequence: Synthetic peptide
  N-term H or Acetyl
  MOD_RES (2)..(2): Modified Cys
  MOD_RES (4)..(4): Tyr or Phospho-Tyr
  MOD_RES (5)..(5): Leu or Nle (i.e. isomer of Leucine)
  See specification as filed for detailed description of substitutions and preferred embodiments
RCDYLTWQIGKK

SEQ ID NO: 5903 - protein, 12 aa, Artificial Sequence
  Description of Artificial Sequence: Synthetic peptide
  N-term H or Acetyl
  MOD_RES (2)..(2): Modified Cys
  MOD_RES (4)..(4): Tyr or Phospho-Tyr
  MOD_RES (5)..(5): Leu or Nle (i.e. isomer of Leucine)
  See specification as filed for detailed description of substitutions and preferred embodiments
RCDYLVMQIGKK

SEQ ID NO: 5904 - protein, 12 aa, Artificial Sequence
  Description of Artificial Sequence: Synthetic peptide
  N-term H or Acetyl
  MOD_RES (2)..(2): Modified Cys
  MOD_RES (4)..(4): Tyr or Phospho-Tyr
  MOD_RES (5)..(5): Leu or Nle (i.e. isomer of Leucine)
  See specification as filed for detailed description of substitutions and preferred embodiments
RCDYLWMQIGKK

SEQ ID NO: 5905 - protein, 12 aa, Artificial Sequence
  Description of Artificial Sequence: Synthetic peptide
  N-term H or Acetyl
  MOD_RES (2)..(2): Modified Cys
  MOD_RES (4)..(4): Tyr or Phospho-Tyr
  See specification as filed for detailed description of substitutions and preferred embodiments
RCDYATMQIGKK

SEQ ID NO: 5906 - protein, 12 aa, Artificial Sequence
  Description of Artificial Sequence: Synthetic peptide
  N-term H or Acetyl
  MOD_RES (2)..(2): Modified Cys
  MOD_RES (4)..(4): Tyr or Phospho-Tyr
  See specification as filed for detailed description of substitutions and preferred embodiments
RCDYDTMQIGKK

SEQ ID NO: 5907 - protein, 12 aa, Artificial Sequence
  Description of Artificial Sequence: Synthetic peptide
  N-term H or Acetyl
  MOD_RES (2)..(2): Modified Cys
  MOD_RES (4)..(4): Tyr or Phospho-Tyr
  See specification as filed for detailed description of substitutions and preferred embodiments
RCDYETMQIGKK

SEQ ID NO: 5908 - protein, 12 aa, Artificial Sequence
  Description of Artificial Sequence: Synthetic peptide
  N-term H or Acetyl
  MOD_RES (2)..(2): Modified Cys
  MOD_RES (4)..(4): Tyr or Phospho-Tyr
  See specification as filed for detailed description of substitutions and preferred embodiments
RCDYFTMQIGKK

SEQ ID NO: 5909 - protein, 12 aa, Artificial Sequence
  Description of Artificial Sequence: Synthetic peptide
  N-term H or Acetyl
  MOD_RES (2)..(2): Modified Cys
  MOD_RES (4)..(4): Tyr or Phospho-Tyr
  See specification as filed for detailed description of substitutions and preferred embodiments
RCDYGTMQIGKK

SEQ ID NO: 5910 - protein, 12 aa, Artificial Sequence
  Description of Artificial Sequence: Synthetic peptide
  N-term H or Acetyl
  MOD_RES (2)..(2): Modified Cys
  MOD_RES (4)..(4): Tyr or Phospho-Tyr
  See specification as filed for detailed description of substitutions and preferred embodiments
RCDYHTMQIGKK

SEQ ID NO: 5911 - protein, 12 aa, Artificial Sequence
  Description of Artificial Sequence: Synthetic peptide
  N-term H or Acetyl
  MOD_RES (2)..(2): Modified Cys
  MOD_RES (4)..(4): Tyr or Phospho-Tyr
  See specification as filed for detailed description of substitutions and preferred embodiments
RCDYITMQIGKK

SEQ ID NO: 5912 - protein, 12 aa, Artificial Sequence
  Description of Artificial Sequence: Synthetic peptide
  N-term H or Acetyl
  MOD_RES (2)..(2): Modified Cys
  MOD_RES (4)..(4): Tyr or Phospho-Tyr
  See specification as filed for detailed description of substitutions and preferred embodiments
RCDYKTMQIGKK

SEQ ID NO: 5913 - protein, 12 aa, Artificial Sequence
  Description of Artificial Sequence: Synthetic peptide
  N-term H or Acetyl
  MOD_RES (2)..(2): Modified Cys
  MOD_RES (4)..(4): Tyr or Phospho-Tyr
  See specification as filed for detailed description of substitutions and preferred embodiments
RCDYLTMQIGKK

SEQ ID NO: 5914 - protein, 12 aa, Artificial Sequence
  Description of Artificial Sequence: Synthetic peptide
  N-term H or Acetyl
  MOD_RES (2)..(2): Modified Cys
  MOD_RES (4)..(4): Tyr or Phospho-Tyr
  See specification as filed for detailed description of substitutions and preferred embodiments
RCDYNTMQIGKK

SEQ ID NO: 5915 - protein, 12 aa, Artificial Sequence
  Description of Artificial Sequence: Synthetic peptide
  N-term H or Acetyl
  MOD_RES (2)..(2): Modified Cys
  MOD_RES (4)..(4): Tyr or Phospho-Tyr
  See specification as filed for detailed description of substitutions and preferred embodiments
RCDYPTMQIGKK

SEQ ID NO: 5916 - protein, 12 aa, Artificial Sequence
  Description of Artificial Sequence: Synthetic peptide
  N-term H or Acetyl
  MOD_RES (2)..(2): Modified Cys
  MOD_RES (4)..(4): Tyr or Phospho-Tyr
  See specification as filed for detailed description of substitutions and preferred embodiments
RCDYQTMQIGKK

SEQ ID NO: 5917 - protein, 12 aa, Artificial Sequence
  Description of Artificial Sequence: Synthetic peptide
  N-term H or Acetyl
  MOD_RES (2)..(2): Modified Cys
  MOD_RES (4)..(4): Tyr or Phospho-Tyr
  See specification as filed for detailed description of substitutions and preferred embodiments
RCDYRTMQIGKK

SEQ ID NO: 5918 - protein, 12 aa, Artificial Sequence
  Description of Artificial Sequence: Synthetic peptide
  N-term H or Acetyl
  MOD_RES (2)..(2): Modified Cys
  MOD_RES (4)..(4): Tyr or Phospho-Tyr
  See specification as filed for detailed description of substitutions and preferred embodiments
RCDYVTMQIGKK

SEQ ID NO: 5919 - protein, 12 aa, Artificial Sequence
  Description of Artificial Sequence: Synthetic peptide
  N-term H or Acetyl
  MOD_RES (2)..(2): Modified Cys
  MOD_RES (4)..(4): Tyr or Phospho-Tyr
  See specification as filed for detailed description of substitutions and preferred embodiments
RCDYWTMQIGKK

SEQ ID NO: 5920 - protein, 12 aa, Artificial Sequence
  Description of Artificial Sequence: Synthetic peptide
  N-term H or Acetyl
  MOD_RES (2)..(2): Modified Cys
  MOD_RES (4)..(4): Tyr or Phospho-Tyr
  MOD_RES (5)..(5): Leu or Nle (i.e. isomer of Leucine)
  See specification as filed for detailed description of substitutions and preferred embodiments
RCEYLTMQIGKK

SEQ ID NO: 5921 - protein, 12 aa, Artificial Sequence
  Description of Artificial Sequence: Synthetic peptide
  N-term H or Acetyl
  MOD_RES (2)..(2): Modified Cys
  MOD_RES (4)..(4): Tyr or Phospho-Tyr
  MOD_RES (5)..(5): Leu or Nle (i.e. isomer of Leucine)
  See specification as filed for detailed description of substitutions and preferred embodiments
RCFYLTMQIGKK

SEQ ID NO: 5922 - protein, 12 aa, Artificial Sequence
  Description of Artificial Sequence: Synthetic peptide
  N-term H or Acetyl
  MOD_RES (2)..(2): Modified Cys
  MOD_RES (4)..(4): Tyr or Phospho-Tyr
  MOD_RES (5)..(5): Leu or Nle (i.e. isomer of Leucine)
  See specification as filed for detailed description of substitutions and preferred embodiments
RCGYLTMQIGKK

SEQ ID NO: 5923 - protein, 12 aa, Artificial Sequence
  Description of Artificial Sequence: Synthetic peptide
  N-term H or Acetyl
  MOD_RES (2)..(2): Modified Cys
  MOD_RES (4)..(4): Tyr or Phospho-Tyr
  MOD_RES (5)..(5): Leu or Nle (i.e. isomer of Leucine)
  See specification as filed for detailed description of substitutions and preferred embodiments
RCHYLTMQIGKK

SEQ ID NO: 5924 - protein, 12 aa, Artificial Sequence
  Description of Artificial Sequence: Synthetic peptide
  N-term H or Acetyl
  MOD_RES (2)..(2): Modified Cys
  MOD_RES (4)..(4): Tyr or Phospho-Tyr
  MOD_RES (5)..(5): Leu or Nle (i.e. isomer of Leucine)
  See specification as filed for detailed description of substitutions and preferred embodiments
RCIYLTMQIGKK

SEQ ID NO: 5925 - protein, 12 aa, Artificial Sequence
  Description of Artificial Sequence: Synthetic peptide
  N-term H or Acetyl
  MOD_RES (2)..(2): Modified Cys
  MOD_RES (4)..(4): Tyr or Phospho-Tyr
  MOD_RES (5)..(5): Leu or Nle (i.e. isomer of Leucine)
  See specification as filed for detailed description of substitutions and preferred embodiments
RCKYLTMQIGKK

SEQ ID NO: 5926 - protein, 12 aa, Artificial Sequence
  Description of Artificial Sequence: Synthetic peptide
  N-term H or Acetyl
  MOD_RES (2)..(2): Modified Cys
  MOD_RES (4)..(4): Tyr or Phospho-Tyr
  MOD_RES (5)..(5): Leu or Nle (i.e. isomer of Leucine)
  See specification as filed for detailed description of substitutions and preferred embodiments
RCLYLTMQIGKK

SEQ ID NO: 5927 - protein, 12 aa, Artificial Sequence
  Description of Artificial Sequence: Synthetic peptide
  N-term H or Acetyl
  MOD_RES (2)..(2): Modified Cys
  MOD_RES (4)..(4): Tyr or Phospho-Tyr
  MOD_RES (5)..(5): Leu or Nle (i.e. isomer of Leucine)
  See specification as filed for detailed description of substitutions and preferred embodiments
RCNYLTMQIGKK

SEQ ID NO: 5928 - protein, 12 aa, Artificial Sequence
  Description of Artificial Sequence: Synthetic peptide
  N-term H or Acetyl
  MOD_RES (2)..(2): Modified Cys
  MOD_RES (4)..(4): Tyr or Phospho-Tyr
  MOD_RES (5)..(5): Leu or Nle (i.e. isomer of Leucine)
  See specification as filed for detailed description of substitutions and preferred embodiments
RCPYLTMQIGKK

SEQ ID NO: 5929 - protein, 12 aa, Artificial Sequence
  Description of Artificial Sequence: Synthetic peptide
  N-term H or Acetyl
  MOD_RES (2)..(2): Modified Cys
  MOD_RES (4)..(4): Tyr or Phospho-Tyr
  MOD_RES (5)..(5): Leu or Nle (i.e. isomer of Leucine)
  See specification as filed for detailed description of substitutions and preferred embodiments
RCQYLTMQIGKK

SEQ ID NO: 5930 - protein, 12 aa, Artificial Sequence
  Description of Artificial Sequence: Synthetic peptide
  N-term H or Acetyl
  MOD_RES (2)..(2): Modified Cys
  MOD_RES (4)..(4): Tyr or Phospho-Tyr
  MOD_RES (5)..(5): Leu or Nle (i.e. isomer of Leucine)
  See specification as filed for detailed description of substitutions and preferred embodiments
RCRYLTMQIGKK

SEQ ID NO: 5931 - protein, 12 aa, Artificial Sequence
  Description of Artificial Sequence: Synthetic peptide
  N-term H or Acetyl
  MOD_RES (2)..(2): Modified Cys
  MOD_RES (4)..(4): Tyr or Phospho-Tyr
  MOD_RES (5)..(5): Leu or Nle (i.e. isomer of Leucine)
  See specification as filed for detailed description of substitutions and preferred embodiments
RCVYLTMQIGKK

SEQ ID NO: 5932 - protein, 12 aa, Artificial Sequence
  Description of Artificial Sequence: Synthetic peptide
  N-term H or Acetyl
  MOD_RES (2)..(2): Modified Cys
  MOD_RES (4)..(4): Tyr or Phospho-Tyr
  MOD_RES (5)..(5): Leu or Nle (i.e. isomer of Leucine)
  See specification as filed for detailed description of substitutions and preferred embodiments
VCDYLTMQIGKK

SEQ ID NO: 5933 - protein, 16 aa, Artificial Sequence
  Description of Artificial Sequence: Synthetic peptide
  N-term H or Acetyl
  MOD_RES (10)..(10): Modified Cys
  MOD_RES (12)..(12): Ser or Phospho-Ser
  See specification as filed for detailed description of substitutions and preferred embodiments
KKHTDDGYMCMSPGVA

SEQ ID NO: 5934 - protein, 16 aa, Artificial Sequence
  Description of Artificial Sequence: Synthetic peptide
  N-term H or Acetyl
  MOD_RES (4)..(4): Thr or Phospho-Thr
  MOD_RES (6)..(6): Modified Cys
  See specification as filed for detailed description of substitutions and preferred embodiments
KKHTDCGYMPMSPGVA

SEQ ID NO: 5935 - protein, 16 aa, Artificial Sequence
  Description of Artificial Sequence: Synthetic peptide
  N-term H or Acetyl
  MOD_RES (9)..(9): Leu or Nle (i.e. isomer of Leucine)
  MOD_RES (10)..(10): Modified Cys
  MOD_RES (11)..(11): Leu or Nle (i.e. isomer of Leucine)
  MOD_RES (12)..(12): Ser or Phospho-Ser
  See specification as filed for detailed description of substitutions and preferred embodiments
KKHTDDGYLCLSPGVA

SEQ ID NO: 5936 - protein, 16 aa, Artificial Sequence
  Description of Artificial Sequence: Synthetic peptide
  N-term H or Acetyl
  MOD_RES (4)..(4): Thr or Phospho-Thr
  MOD_RES (6)..(6): Modified Cys
  MOD_RES (9)..(9): Leu or Nle (i.e. isomer of Leucine)
  MOD_RES (11)..(11): Leu or Nle (i.e. isomer of Leucine)
  See specification as filed for detailed description of substitutions and preferred embodiments
KKHTDCGYLPLSPGVA

SEQ ID NO: 5937 - protein, 18 aa, Artificial Sequence
  Description of Artificial Sequence: Synthetic peptide
  N-term H or Acetyl
  MOD_RES (16)..(16): Modified Cys
  MOD_RES (18)..(18): Ser or Phospho-Ser
  See specification as filed for detailed description of substitutions and preferred embodiments
KKKKVKKRPQRAHSDCFS

SEQ ID NO: 5938 - protein, 19 aa, Artificial Sequence
  Description of Artificial Sequence: Synthetic peptide
  N-term H or Acetyl
  MOD_RES (5)..(5): Ser or Phospho-Ser
  MOD_RES (7)..(7): Modified Cys
  See specification as filed for detailed description of substitutions and preferred embodiments
EDFSSICDMDFSALLSQIS

SEQ ID NO: 5939 - protein, 11 aa, Artificial Sequence
  Description of Artificial Sequence: Synthetic peptide
  N-term H or Acetyl
  MOD_RES (7)..(7): Ser or Phospho-Ser
  MOD_RES (9)..(9): Modified Cys
  See specification as filed for detailed description of substitutions and preferred embodiments
GDQDYLSLCVG

SEQ ID NO: 5940 - protein, 13 aa, Artificial Sequence
  Description of Artificial Sequence: Synthetic peptide
  N-term H or Acetyl
  MOD_RES (9)..(9): Ser or Phospho-Ser
  MOD_RES (10)..(10): Modified Cys
  See specification as filed for detailed description of substitutions and preferred embodiments
KKRAARATSCVFA

SEQ ID NO: 5941 - protein, 14 aa, Artificial Sequence
  Description of Artificial Sequence: Synthetic peptide
  N-term H or Acetyl
  MOD_RES (9)..(9): Ser or Phospho-Ser
  MOD_RES (11)..(11): Modified Cys
  See specification as filed for detailed description of substitutions and preferred embodiments
ARKRRRHPSGCPTA

SEQ ID NO: 5942 - protein, 13 aa, Artificial Sequence
  Description of Artificial Sequence: Synthetic peptide
  N-term H or Acetyl
  MOD_RES (9)..(9): Ser or Phospho-Ser
  MOD_RES (11)..(11): Modified Cys
  See specification as filed for detailed description of substitutions and preferred embodiments
ARKRRRHPSGCPT

SEQ ID NO: 5943 - protein, 12 aa, Artificial Sequence
  Description of Artificial Sequence: Synthetic peptide
  N-term H or Acetyl
  MOD_RES (9)..(9): Ser or Phospho-Ser
  MOD_RES (11)..(11): Modified Cys
  See specification as filed for detailed description of substitutions and preferred embodiments
ARKRRRHPSGCP

SEQ ID NO: 5944 - protein, 12 aa, Artificial Sequence
  Description of Artificial Sequence: Synthetic peptide
  N-term H or Acetyl
  MOD_RES (9)..(9): Ser or Phospho-Ser
  MOD_RES (11)..(11): Pro or d-isoform of Pro
  MOD_RES (12)..(12): Modified Cys
  See specification as filed for detailed description of substitutions and preferred embodiments
ARKRRRHPSGPC

SEQ ID NO: 5945 - protein, 12 aa, Artificial Sequence
  Description of Artificial Sequence: Synthetic peptide
  N-term H or Acetyl
  MOD_RES (9)..(9): Ser or Phospho-Ser
  MOD_RES (12)..(12): Modified Cys
  See specification as filed for detailed description of substitutions and preferred embodiments
ARKRRRHPSGPC

SEQ ID NO: 5946 - protein, 11 aa, Artificial Sequence
  Description of Artificial Sequence: Synthetic peptide
  N-term H or Acetyl
  MOD_RES (9)..(9): Ser or Phospho-Ser
  MOD_RES (11)..(11): Modified Cys
  See specification as filed for detailed description of substitutions and preferred embodiments
ARKRRRHPSGC

SEQ ID NO: 5947 - protein, 8 aa, Artificial Sequence
  Description of Artificial Sequence: Synthetic peptide
  N-term H or Acetyl
  MOD_RES (6)..(6): Ser or Phospho-Ser
  MOD_RES (8)..(8): Modified Cys
  See specification as filed for detailed description of substitutions and preferred embodiments
RRRQFSLC

SEQ ID NO: 5948 - protein, 21 aa, Artificial Sequence
  Description of Artificial Sequence: Synthetic peptide
  N-term H or Acetyl
  MOD_RES (12)..(12): Ser or Phospho-Ser
  MOD_RES (14)..(14): Modified Cys
  See specification as filed for detailed description of substitutions and preferred embodiments
KKERLLDDRHDSGCDDMKDEE

SEQ ID NO: 5949 - protein, 21 aa, Artificial Sequence
  Description of Artificial Sequence: Synthetic peptide
  N-term H or Acetyl
  MOD_RES (12)..(12): Ser or Phospho-Ser
  MOD_RES (14)..(14): Modified Cys
  See specification as filed for detailed description of substitutions and preferred embodiments
KKERLLDDRHDSGCDEMKDEE

SEQ ID NO: 5950 - protein, 21 aa, Artificial Sequence
  Description of Artificial Sequence: Synthetic peptide
  N-term H or Acetyl
  MOD_RES (12)..(12): Ser or Phospho-Ser
  MOD_RES (14)..(14): Modified Cys
  See specification as filed for detailed description of substitutions and preferred embodiments
KKERLLDDRHDSGCDAMKDEE

SEQ ID NO: 5951 - protein, 21 aa, Artificial Sequence
  Description of Artificial Sequence: Synthetic peptide
  N-term H or Acetyl
  MOD_RES (14)..(14): Modified Cys
  MOD_RES (16)..(16): Ser or Phospho-Ser
  See specification as filed for detailed description of substitutions and preferred embodiments
KKERLLDDRHDDGCDSMKDEE

SEQ ID NO: 5952 - protein, 21 aa, Artificial Sequence
  Description of Artificial Sequence: Synthetic peptide
  N-term H or Acetyl
  MOD_RES (14)..(14): Modified Cys
  MOD_RES (16)..(16): Ser or Phospho-Ser
  See specification as filed for detailed description of substitutions and preferred embodiments
KKERLLDDRHDEGCDSMKDEE

SEQ ID NO: 5953 - protein, 21 aa, Artificial Sequence
  Description of Artificial Sequence: Synthetic peptide
  N-term H or Acetyl
  MOD_RES (14)..(14): Modified Cys
  MOD_RES (16)..(16): Ser or Phospho-Ser
  See specification as filed for detailed description of substitutions and preferred embodiments
KKERLLDDRHDAGCDSMKDEE

SEQ ID NO: 5954 - protein, 11 aa, Artificial Sequence
  Description of Artificial Sequence: Synthetic peptide
  N-term H or Acetyl
  MOD_RES (1)..(1): Leu or Nle (i.e. isomer of Leucine)
  MOD_RES (4)..(4): Modified Cys
  MOD_RES (6)..(6): Ser or Phospho-Ser
  See specification as filed for detailed description of substitutions and preferred embodiments
LKRCASFKKFA

SEQ ID NO: 5955 - protein, 11 aa, Artificial Sequence
  Description of Artificial Sequence: Synthetic peptide
  N-term H or Acetyl
  MOD_RES (4)..(4): Modified Cys
  MOD_RES (6)..(6): Ser or Phospho-Ser
  See specification as filed for detailed description of substitutions and preferred embodiments
AKRCASFKKFA

SEQ ID NO: 5956 - protein, 11 aa, Artificial Sequence
  Description of Artificial Sequence: Synthetic peptide
  N-term H or Acetyl
  MOD_RES (4)..(4): Modified Cys
  MOD_RES (6)..(6): Ser or Phospho-Ser
  See specification as filed for detailed description of substitutions and preferred embodiments
DKRCASFKKFA

SEQ ID NO: 5957 - protein, 11 aa, Artificial Sequence
  Description of Artificial Sequence: Synthetic peptide
  N-term H or Acetyl
  MOD_RES (4)..(4): Modified Cys
  MOD_RES (6)..(6): Ser or Phospho-Ser
  See specification as filed for detailed description of substitutions and preferred embodiments
EKRCASFKKFA

SEQ ID NO: 5958 - protein, 11 aa, Artificial Sequence
  Description of Artificial Sequence: Synthetic peptide
  N-term H or Acetyl
  MOD_RES (4)..(4): Modified Cys
  MOD_RES (6)..(6): Ser or Phospho-Ser
  See specification as filed for detailed description of substitutions and preferred embodiments
FKRCASFKKFA

SEQ ID NO: 5959 - protein, 11 aa, Artificial Sequence
  Description of Artificial Sequence: Synthetic peptide
  N-term H or Acetyl
  MOD_RES (4)..(4): Modified Cys
  MOD_RES (6)..(6): Ser or Phospho-Ser
  See specification as filed for detailed description of substitutions and preferred embodiments
GKRCASFKKFA

SEQ ID NO: 5960 - protein, 11 aa, Artificial Sequence
  Description of Artificial Sequence: Synthetic peptide
  N-term H or Acetyl
  MOD_RES (4)..(4): Modified Cys
  MOD_RES (6)..(6): Ser or Phospho-Ser
  See specification as filed for detailed description of substitutions and preferred embodiments
HKRCASFKKFA

SEQ ID NO: 5961 - protein, 11 aa, Artificial Sequence
  Description of Artificial Sequence: Synthetic peptide
  N-term H or Acetyl
  MOD_RES (4)..(4): Modified Cys
  MOD_RES (6)..(6): Ser or Phospho-Ser
  See specification as filed for detailed description of substitutions and preferred embodiments
IKRCASFKKFA

SEQ ID NO: 5962 - protein, 11 aa, Artificial Sequence
  Description of Artificial Sequence: Synthetic peptide
  N-term H or Acetyl
  MOD_RES (4)..(4): Modified Cys
  MOD_RES (6)..(6): Ser or Phospho-Ser
  See specification as filed for detailed description of substitutions and preferred embodiments
KKRCASFKKFA

SEQ ID NO: 5963 - protein, 11 aa, Artificial Sequence
  Description of Artificial Sequence: Synthetic peptide
  N-term H or Acetyl
  MOD_RES (2)..(2): Leu or Nle (i.e. isomer of Leucine)
  MOD_RES (4)..(4): Modified Cys
  MOD_RES (6)..(6): Ser or Phospho-Ser
  See specification as filed for detailed description of substitutions and preferred embodiments
LLRCASFKKFA

SEQ ID NO: 5964 - protein, 11 aa, Artificial Sequence
  Description of Artificial Sequence: Synthetic peptide
  N-term H or Acetyl
  MOD_RES (4)..(4): Modified Cys
  MOD_RES (6)..(6): Ser or Phospho-Ser
  See specification as filed for detailed description of substitutions and preferred embodiments
LARCASFKKFA

SEQ ID NO: 5965 - protein, 11 aa, Artificial Sequence
  Description of Artificial Sequence: Synthetic peptide
  N-term H or Acetyl
  MOD_RES (4)..(4): Modified Cys
  MOD_RES (6)..(6): Ser or Phospho-Ser
  See specification as filed for detailed description of substitutions and preferred embodiments
LDRCASFKKFA

SEQ ID NO: 5966 - protein, 11 aa, Artificial Sequence
  Description of Artificial Sequence: Synthetic peptide
  N-term H or Acetyl
  MOD_RES (4)..(4): Modified Cys
  MOD_RES (6)..(6): Ser or Phospho-Ser
  See specification as filed for detailed description of substitutions and preferred embodiments
LERCASFKKFA

SEQ ID NO: 5967 - protein, 11 aa, Artificial Sequence
  Description of Artificial Sequence: Synthetic peptide
  N-term H or Acetyl
  MOD_RES (4)..(4): Modified Cys
  MOD_RES (6)..(6): Ser or Phospho-Ser
  See specification as filed for detailed description of substitutions and preferred embodiments
LFRCASFKKFA

SEQ ID NO: 5968 - protein, 11 aa, Artificial Sequence
  Description of Artificial Sequence: Synthetic peptide
  N-term H or Acetyl
  MOD_RES (4)..(4): Modified Cys
  MOD_RES (6)..(6): Ser or Phospho-Ser
  See specification as filed for detailed description of substitutions and preferred embodiments
LGRCASFKKFA

SEQ ID NO: 5969 - protein, 11 aa, Artificial Sequence
  Description of Artificial Sequence: Synthetic peptide
  N-term H or Acetyl
  MOD_RES (4)..(4): Modified Cys
  MOD_RES (6)..(6): Ser or Phospho-Ser
  See specification as filed for detailed description of substitutions and preferred embodiments
LHRCASFKKFA

SEQ ID NO: 5970 - protein, 11 aa, Artificial Sequence
  Description of Artificial Sequence: Synthetic peptide
  N-term H or Acetyl
  MOD_RES (4)..(4): Modified Cys
  MOD_RES (6)..(6): Ser or Phospho-Ser
  See specification as filed for detailed description of substitutions and preferred embodiments
LIRCASFKKFA

SEQ ID NO: 5971 - protein, 11 aa, Artificial Sequence
  Description of Artificial Sequence: Synthetic peptide
  N-term H or Acetyl
  MOD_RES (3)..(3): Leu or Nle (i.e. isomer of Leucine)
  MOD_RES (4)..(4): Modified Cys
  MOD_RES (6)..(6): Ser or Phospho-Ser
  See specification as filed for detailed description of substitutions and preferred embodiments
LKLCASFKKFA

SEQ ID NO: 5972 - protein, 11 aa, Artificial Sequence
  Description of Artificial Sequence: Synthetic peptide
  N-term H or Acetyl
  MOD_RES (4)..(4): Modified Cys
  MOD_RES (6)..(6): Ser or Phospho-Ser
  See specification as filed for detailed description of substitutions and preferred embodiments
LKACASFKKFA

SEQ ID NO: 5973 - protein, 11 aa, Artificial Sequence
  Description of Artificial Sequence: Synthetic peptide
  N-term H or Acetyl
  MOD_RES (4)..(4): Modified Cys
  MOD_RES (6)..(6): Ser or Phospho-Ser
  See specification as filed for detailed description of substitutions and preferred embodiments
LKDCASFKKFA

SEQ ID NO: 5974 - protein, 11 aa, Artificial Sequence
  Description of Artificial Sequence: Synthetic peptide
  N-term H or Acetyl
  MOD_RES (4)..(4): Modified Cys
  MOD_RES (6)..(6): Ser or Phospho-Ser
  See specification as filed for detailed description of substitutions and preferred embodiments
LKECASFKKFA

SEQ ID NO: 5975 - protein, 11 aa, Artificial Sequence
  Description of Artificial Sequence: Synthetic peptide
  N-term H or Acetyl
  MOD_RES (4)..(4): Modified Cys
  MOD_RES (6)..(6): Ser or Phospho-Ser
  See specification as filed for detailed description of substitutions and preferred embodiments
LKFCASFKKFA

SEQ ID NO: 5976 - protein, 11 aa, Artificial Sequence
  Description of Artificial Sequence: Synthetic peptide
  N-term H or Acetyl
  MOD_RES (4)..(4): Modified Cys
  MOD_RES (6)..(6): Ser or Phospho-Ser
  See specification as filed for detailed description of substitutions and preferred embodiments
LKGCASFKKFA

SEQ ID NO: 5977 - protein, 11 aa, Artificial Sequence
  Description of Artificial Sequence: Synthetic peptide
  N-term H or Acetyl
  MOD_RES (4)..(4): Modified Cys
  MOD_RES (6)..(6): Ser or Phospho-Ser
  See specification as filed for detailed description of substitutions and preferred embodiments
LKHCASFKKFA

SEQ ID NO: 5978 - protein, 11 aa, Artificial Sequence
  Description of Artificial Sequence: Synthetic peptide
  N-term H or Acetyl
  MOD_RES (4)..(4): Modified Cys
  MOD_RES (6)..(6): Ser or Phospho-Ser
  See specification as filed for detailed description of substitutions and preferred embodiments
LKICASFKKFA

SEQ ID NO: 5979 - protein, 11 aa, Artificial Sequence
  Description of Artificial Sequence: Synthetic peptide
  N-term H or Acetyl
  MOD_RES (4)..(4): Modified Cys
  MOD_RES (6)..(6): Ser or Phospho-Ser
  See specification as filed for detailed description of substitutions and preferred embodiments
LKKCASFKKFA

SEQ ID NO: 5980 - protein, 11 aa, Artificial Sequence
  Description of Artificial Sequence: Synthetic peptide
  N-term H or Acetyl
  MOD_RES (4)..(4): Modified Cys
  MOD_RES (6)..(6): Ser or Phospho-Ser
  See specification as filed for detailed description of substitutions and preferred embodiments
LKLCASFKKFA

SEQ ID NO: 5981 - protein, 11 aa, Artificial Sequence
  Description of Artificial Sequence: Synthetic peptide
  N-term H or Acetyl
  MOD_RES (4)..(4): Modified Cys
  MOD_RES (6)..(6): Ser or Phospho-Ser
  See specification as filed for detailed description of substitutions and preferred embodiments
LKNCASFKKFA

SEQ ID NO: 5982 - protein, 11 aa, Artificial Sequence
  Description of Artificial Sequence: Synthetic peptide
  N-term H or Acetyl
  MOD_RES (4)..(4): Modified Cys
  MOD_RES (6)..(6): Ser or Phospho-Ser
  See specification as filed for detailed description of substitutions and preferred embodiments
LKPCASFKKFA

SEQ ID NO: 5983 - protein, 11 aa, Artificial Sequence
  Description of Artificial Sequence: Synthetic peptide
  N-term H or Acetyl
  MOD_RES (4)..(4): Modified Cys
  MOD_RES (6)..(6): Ser or Phospho-Ser
  See specification as filed for detailed description of substitutions and preferred embodiments
LKQCASFKKFA

SEQ ID NO: 5984 - protein, 11 aa, Artificial Sequence
  Description of Artificial Sequence: Synthetic peptide
  N-term H or Acetyl
  MOD_RES (4)..(4): Modified Cys
  MOD_RES (5)..(5): Leu or Nle (i.e. isomer of Leucine)
  MOD_RES (6)..(6): Ser or Phospho-Ser
  See specification as filed for detailed description of substitutions and preferred embodiments
LKRCLSFKKFA

SEQ ID NO: 5985 - protein, 11 aa, Artificial Sequence
  Description of Artificial Sequence: Synthetic peptide
  N-term H or Acetyl
  MOD_RES (4)..(4): Modified Cys
  MOD_RES (6)..(6): Ser or Phospho-Ser
  MOD_RES (7)..(7): Leu or Nle (i.e. isomer of Leucine)
  See specification as filed for detailed description of substitutions and preferred embodiments
LKRCASLKKFA

SEQ ID NO: 5986 - protein, 11 aa, Artificial Sequence
  Description of Artificial Sequence: Synthetic peptide
  N-term H or Acetyl
  MOD_RES (4)..(4): Modified Cys
  MOD_RES (6)..(6): Ser or Phospho-Ser
  See specification as filed for detailed description of substitutions and preferred embodiments
LKRCASAKKFA

SEQ ID NO: 5987 - protein, 11 aa, Artificial Sequence
  Description of Artificial Sequence: Synthetic peptide
  N-term H or Acetyl
  MOD_RES (4)..(4): Modified Cys
  MOD_RES (6)..(6): Ser or Phospho-Ser
  See specification as filed for detailed description of substitutions and preferred embodiments
LKRCASDKKFA

SEQ ID NO: 5988 - protein, 11 aa, Artificial Sequence
  Description of Artificial Sequence: Synthetic peptide
  N-term H or Acetyl
  MOD_RES (4)..(4): Modified Cys
  MOD_RES (6)..(6): Ser or Phospho-Ser
  See specification as filed for detailed description of substitutions and preferred embodiments
LKRCASEKKFA

SEQ ID NO: 5989 - protein, 11 aa, Artificial Sequence
  Description of Artificial Sequence: Synthetic peptide
  N-term H or Acetyl
  MOD_RES (4)..(4): Modified Cys
  MOD_RES (6)..(6): Ser or Phospho-Ser
  MOD_RES (8)..(8): Leu or Nle (i.e. isomer of Leucine)
  See specification as filed for detailed description of substitutions and preferred embodiments
LKRCASFLKFA

SEQ ID NO: 5990 - protein, 11 aa, Artificial Sequence
  Description of Artificial Sequence: Synthetic peptide
  N-term H or Acetyl
  MOD_RES (4)..(4): Modified Cys
  MOD_RES (6)..(6): Ser or Phospho-Ser
  See specification as filed for detailed description of substitutions and preferred embodiments
LKRCASFAKFA

SEQ ID NO: 5991 - protein, 11 aa, Artificial Sequence
  Description of Artificial Sequence: Synthetic peptide
  N-term H or Acetyl
  MOD_RES (4)..(4): Modified Cys
  MOD_RES (6)..(6): Ser or Phospho-Ser
  See specification as filed for detailed description of substitutions and preferred embodiments
LKRCASFDKFA

SEQ ID NO: 5992 - protein, 11 aa, Artificial Sequence
  Description of Artificial Sequence: Synthetic peptide
  N-term H or Acetyl
  MOD_RES (4)..(4): Modified Cys
  MOD_RES (6)..(6): Ser or Phospho-Ser
  See specification as filed for detailed description of substitutions and preferred embodiments
LKRCASFEKFA

SEQ ID NO: 5993 - protein, 11 aa, Artificial Sequence
  Description of Artificial Sequence: Synthetic peptide
  N-term H or Acetyl
  MOD_RES (4)..(4): Modified Cys
  MOD_RES (6)..(6): Ser or Phospho-Ser
  See specification as filed for detailed description of substitutions and preferred embodiments
LKRCASFFKFA

SEQ ID NO: 5994 - protein, 11 aa, Artificial Sequence
  Description of Artificial Sequence: Synthetic peptide
  N-term H or Acetyl
  MOD_RES (4)..(4): Modified Cys
  MOD_RES (6)..(6): Ser or Phospho-Ser
  See specification as filed for detailed description of substitutions and preferred embodiments
LKRCASFGKFA

SEQ ID NO: 5995 - protein, 11 aa, Artificial Sequence
  Description of Artificial Sequence: Synthetic peptide
  N-term H or Acetyl
  MOD_RES (4)..(4): Modified Cys
  MOD_RES (6)..(6): Ser or Phospho-Ser
  See specification as filed for detailed description of substitutions and preferred embodiments
LKRCASFHKFA

SEQ ID NO: 5996 - protein, 11 aa, Artificial Sequence
  Description of Artificial Sequence: Synthetic peptide
  N-term H or Acetyl
  MOD_RES (4)..(4): Modified Cys
  MOD_RES (6)..(6): Ser or Phospho-Ser
  See specification as filed for detailed description of substitutions and preferred embodiments
LKRCASFIKFA

SEQ ID NO: 5997 - protein, 11 aa, Artificial Sequence
  Description of Artificial Sequence: Synthetic peptide
  N-term H or Acetyl
  MOD_RES (4)..(4): Modified Cys
  MOD_RES (6)..(6): Ser or Phospho-Ser
  MOD_RES (9)..(9): Leu or Nle (i.e. isomer of Leucine)
  See specification as filed for detailed description of substitutions and preferred embodiments
LKRCASFKLFA

SEQ ID NO: 5998 - protein, 11 aa, Artificial Sequence
  Description of Artificial Sequence: Synthetic peptide
  N-term H or Acetyl
  MOD_RES (4)..(4): Modified Cys
  MOD_RES (6)..(6): Ser or Phospho-Ser
  See specification as filed for detailed description of substitutions and preferred embodiments
LKRCASFKAFA

SEQ ID NO: 5999 - protein, 11 aa, Artificial Sequence
  Description of Artificial Sequence: Synthetic peptide
  N-term H or Acetyl
  MOD_RES (4)..(4): Modified Cys
  MOD_RES (6)..(6): Ser or Phospho-Ser
  See specification as filed for detailed description of substitutions and preferred embodiments
LKRCASFKDFA

SEQ ID NO: 6000 - protein, 11 aa, Artificial Sequence
  Description of Artificial Sequence: Synthetic peptide
  N-term H or Acetyl
  MOD_RES (4)..(4): Modified Cys
  MOD_RES (6)..(6): Ser or Phospho-Ser
  See specification as filed for detailed description of substitutions and preferred embodiments
LKRCASFKEFA

SEQ ID NO: 6001 - protein, 11 aa, Artificial Sequence
  Description of Artificial Sequence: Synthetic peptide
  N-term H or Acetyl
  MOD_RES (4)..(4): Modified Cys
  MOD_RES (6)..(6): Ser or Phospho-Ser
  See specification as filed for detailed description of substitutions and preferred embodiments
LKRCASFKFFA

SEQ ID NO: 6002 - protein, 11 aa, Artificial Sequence
  Description of Artificial Sequence: Synthetic peptide
  N-term H or Acetyl
  MOD_RES (4)..(4): Modified Cys
  MOD_RES (6)..(6): Ser or Phospho-Ser
  See specification as filed for detailed description of substitutions and preferred embodiments
LKRCASFKGFA

SEQ ID NO: 6003 - protein, 11 aa, Artificial Sequence
  Description of Artificial Sequence: Synthetic peptide
  N-term H or Acetyl
  MOD_RES (4)..(4): Modified Cys
  MOD_RES (6)..(6): Ser or Phospho-Ser
  See specification as filed for detailed description of substitutions and preferred embodiments
LKRCASFKHFA

SEQ ID NO: 6004 - protein, 11 aa, Artificial Sequence
  Description of Artificial Sequence: Synthetic peptide
  N-term H or Acetyl
  MOD_RES (4)..(4): Modified Cys
  MOD_RES (6)..(6): Ser or Phospho-Ser
  See specification as filed for detailed description of substitutions and preferred embodiments
LKRCASFKIFA

SEQ ID NO: 6005 - protein, 11 aa, Artificial Sequence
  Description of Artificial Sequence: Synthetic peptide
  N-term H or Acetyl
  MOD_RES (4)..(4): Modified Cys
  MOD_RES (6)..(6): Ser or Phospho-Ser
  MOD_RES (10)..(10): Leu or Nle (i.e. isomer of Leucine)
  See specification as filed for detailed description of substitutions and preferred embodiments
LKRCASFKKLA

SEQ ID NO: 6006 - protein, 11 aa, Artificial Sequence
  Description of Artificial Sequence: Synthetic peptide
  N-term H or Acetyl
  MOD_RES (4)..(4): Modified Cys
  MOD_RES (6)..(6): Ser or Phospho-Ser
  See specification as filed for detailed description of substitutions and preferred embodiments
LKRCASFKKAA

SEQ ID NO: 6007 - protein, 11 aa, Artificial Sequence
  Description of Artificial Sequence: Synthetic peptide
  N-term H or Acetyl
  MOD_RES (4)..(4): Modified Cys
  MOD_RES (6)..(6): Ser or Phospho-Ser
  See specification as filed for detailed description of substitutions and preferred embodiments
LKRCASFKKDA

SEQ ID NO: 6008 - protein, 11 aa, Artificial Sequence
  Description of Artificial Sequence: Synthetic peptide
  N-term H or Acetyl
  MOD_RES (4)..(4): Modified Cys
  MOD_RES (6)..(6): Ser or Phospho-Ser
  See specification as filed for detailed description of substitutions and preferred embodiments
LKRCASFKKEA

SEQ ID NO: 6009 - protein, 11 aa, Artificial Sequence
  Description of Artificial Sequence: Synthetic peptide
  N-term H or Acetyl
  MOD_RES (4)..(4): Modified Cys
  MOD_RES (6)..(6): Ser or Phospho-Ser
  MOD_RES (11)..(11): Leu or Nle (i.e. isomer of Leucine)
  See specification as filed for detailed description of substitutions and preferred embodiments
LKRCASFKKFL

SEQ ID NO: 6010 - protein, 11 aa, Artificial Sequence
  Description of Artificial Sequence: Synthetic peptide
  N-term H or Acetyl
  MOD_RES (4)..(4): Modified Cys
  MOD_RES (6)..(6): Ser or Phospho-Ser
  See specification as filed for detailed description of substitutions and preferred embodiments
LKRCASFKKFD

SEQ ID NO: 6011 - protein, 11 aa, Artificial Sequence
  Description of Artificial Sequence: Synthetic peptide
  N-term H or Acetyl
  MOD_RES (4)..(4): Modified Cys
  MOD_RES (6)..(6): Ser or Phospho-Ser
  See specification as filed for detailed description of substitutions and preferred embodiments
LKRCASFKKFE

SEQ ID NO: 6012 - protein, 11 aa, Artificial Sequence
  Description of Artificial Sequence: Synthetic peptide
  N-term H or Acetyl
  MOD_RES (4)..(4): Modified Cys
  MOD_RES (6)..(6): Ser or Phospho-Ser
  See specification as filed for detailed description of substitutions and preferred embodiments
LKRCASFKKFF

SEQ ID NO: 6013 - protein, 11 aa, Artificial Sequence
  Description of Artificial Sequence: Synthetic peptide
  N-term H or Acetyl
  MOD_RES (4)..(4): Modified Cys
  MOD_RES (6)..(6): Ser or Phospho-Ser
  See specification as filed for detailed description of substitutions and preferred embodiments
LKRCASFKKFG

SEQ ID NO: 6014 - protein, 11 aa, Artificial Sequence
  Description of Artificial Sequence: Synthetic peptide
  N-term H or Acetyl
  MOD_RES (4)..(4): Modified Cys
  MOD_RES (6)..(6): Ser or Phospho-Ser
  See specification as filed for detailed description of substitutions and preferred embodiments
LKRCASFKKFH

SEQ ID NO: 6015 - protein, 11 aa, Artificial Sequence
  Description of Artificial Sequence: Synthetic peptide
  N-term H or Acetyl
  MOD_RES (4)..(4): Modified Cys
  MOD_RES (6)..(6): Ser or Phospho-Ser
  See specification as filed for detailed description of substitutions and preferred embodiments
LKRCASFKKFI

SEQ ID NO: 6016 - protein, 11 aa, Artificial Sequence
  Description of Artificial Sequence: Synthetic peptide
  N-term H or Acetyl
  MOD_RES (4)..(4): Modified Cys
  MOD_RES (6)..(6): Ser or Phospho-Ser
  See specification as filed for detailed description of substitutions and preferred embodiments
LKRCASFKKFK

SEQ ID NO: 6017 - protein, 11 aa, Artificial Sequence
  Description of Artificial Sequence: Synthetic peptide
  N-term H or Acetyl
  MOD_RES (4)..(4): Modified Cys
  MOD_RES (6)..(6): Ser or Phospho-Ser
  See specification as filed for detailed description of substitutions and preferred embodiments
LKRCASFKKFL

SEQ ID NO: 6018 - protein, 11 aa, Artificial Sequence
  Description of Artificial Sequence: Synthetic peptide
  N-term H or Acetyl
  MOD_RES (4)..(4): Modified Cys
  MOD_RES (6)..(6): Ser or Phospho-Ser
  See specification as filed for detailed description of substitutions and preferred embodiments
LKRCASFKKFN

SEQ ID NO: 6019 - protein, 11 aa, Artificial Sequence
  Description of Artificial Sequence: Synthetic peptide
  N-term H or Acetyl
  MOD_RES (4)..(4): Modified Cys
  MOD_RES (6)..(6): Ser or Phospho-Ser
  See specification as filed for detailed description of substitutions and preferred embodiments
LKRCASFKKFP

SEQ ID NO: 6020 - protein, 11 aa, Artificial Sequence
  Description of Artificial Sequence: Synthetic peptide
  N-term H or Acetyl
  MOD_RES (4)..(4): Modified Cys
  MOD_RES (6)..(6): Ser or Phospho-Ser
  See specification as filed for detailed description of substitutions and preferred embodiments
LKRCASFKKFQ

SEQ ID NO: 6021 - protein, 11 aa, Artificial Sequence
  Description of Artificial Sequence: Synthetic peptide
  N-term H or Acetyl
  MOD_RES (4)..(4): Modified Cys
  MOD_RES (6)..(6): Ser or Phospho-Ser
  See specification as filed for detailed description of substitutions and preferred embodiments
LKRCASFKKFR

SEQ ID NO: 6022 - protein, 11 aa, Artificial Sequence
  Description of Artificial Sequence: Synthetic peptide
  N-term H or Acetyl
  MOD_RES (4)..(4): Modified Cys
  MOD_RES (6)..(6): Ser or Phospho-Ser
  See specification as filed for detailed description of substitutions and preferred embodiments
LKRCASFKKFV

SEQ ID NO: 6023 - protein, 11 aa, Artificial Sequence
  Description of Artificial Sequence: Synthetic peptide
  N-term H or Acetyl
  MOD_RES (4)..(4): Modified Cys
  MOD_RES (6)..(6): Ser or Phospho-Ser
  See specification as filed for detailed description of substitutions and preferred embodiments
LKRCASFKKFW

SEQ ID NO: 6024 - protein, 11 aa, Artificial Sequence
  Description of Artificial Sequence: Synthetic peptide
  N-term H or Acetyl
  MOD_RES (4)..(4): Modified Cys
  MOD_RES (6)..(6): Ser or Phospho-Ser
  See specification as filed for detailed description of substitutions and preferred embodiments
LKRCASFKKGA

SEQ ID NO: 6025 - protein, 11 aa, Artificial Sequence
  Description of Artificial Sequence: Synthetic peptide
  N-term H or Acetyl
  MOD_RES (4)..(4): Modified Cys
  MOD_RES (6)..(6): Ser or Phospho-Ser
  See specification as filed for detailed description of substitutions and preferred embodiments
LKRCASFKKHA

SEQ ID NO: 6026 - protein, 11 aa, Artificial Sequence
  Description of Artificial Sequence: Synthetic peptide
  N-term H or Acetyl
  MOD_RES (4)..(4): Modified Cys
  MOD_RES (6)..(6): Ser or Phospho-Ser
  See specification as filed for detailed description of substitutions and preferred embodiments
LKRCASFKKIA

SEQ ID NO: 6027 - protein, 11 aa, Artificial Sequence
  Description of Artificial Sequence: Synthetic peptide
  N-term H or Acetyl
  MOD_RES (4)..(4): Modified Cys
  MOD_RES (6)..(6): Ser or Phospho-Ser
  See specification as filed for detailed description of substitutions and preferred embodiments
LKRCASFKKKA

SEQ ID NO: 6028 - protein, 11 aa, Artificial Sequence
  Description of Artificial Sequence: Synthetic peptide
  N-term H or Acetyl
  MOD_RES (4)..(4): Modified Cys
  MOD_RES (6)..(6): Ser or Phospho-Ser
  See specification as filed for detailed description of substitutions and preferred embodiments
LKRCASFKKLA

SEQ ID NO: 6029 - protein, 11 aa, Artificial Sequence
  Description of Artificial Sequence: Synthetic peptide
  N-term H or Acetyl
  MOD_RES (4)..(4): Modified Cys
  MOD_RES (6)..(6): Ser or Phospho-Ser
  See specification as filed for detailed description of substitutions and preferred embodiments
LKRCASFKKNA

SEQ ID NO: 6030 - protein, 11 aa, Artificial Sequence
  Description of Artificial Sequence: Synthetic peptide
  N-term H or Acetyl
  MOD_RES (4)..(4): Modified Cys
  MOD_RES (6)..(6): Ser or Phospho-Ser
  See specification as filed for detailed description of substitutions and preferred embodiments
LKRCASFKKPA

SEQ ID NO: 6031 - protein, 11 aa, Artificial Sequence
  Description of Artificial Sequence: Synthetic peptide
  N-term H or Acetyl
  MOD_RES (4)..(4): Modified Cys
  MOD_RES (6)..(6): Ser or Phospho-Ser
  See specification as filed for detailed description of substitutions and preferred embodiments
LKRCASFKKQA

SEQ ID NO: 6032 - protein, 11 aa, Artificial Sequence
  Description of Artificial Sequence: Synthetic peptide
  N-term H or Acetyl
  MOD_RES (4)..(4): Modified Cys
  MOD_RES (6)..(6): Ser or Phospho-Ser
  See specification as filed for detailed description of substitutions and preferred embodiments
LKRCASFKKRA

SEQ ID NO: 6033 - protein, 11 aa, Artificial Sequence
  Description of Artificial Sequence: Synthetic peptide
  N-term H or Acetyl
  MOD_RES (4)..(4): Modified Cys
  MOD_RES (6)..(6): Ser or Phospho-Ser
  See specification as filed for detailed description of substitutions and preferred embodiments
LKRCASFKKVA

SEQ ID NO: 6034 - protein, 11 aa, Artificial Sequence
  Description of Artificial Sequence: Synthetic peptide
  N-term H or Acetyl
  MOD_RES (4)..(4): Modified Cys
  MOD_RES (6)..(6): Ser or Phospho-Ser
  See specification as filed for detailed description of substitutions and preferred embodiments
LKRCASFKKWA

SEQ ID NO: 6035 - protein, 11 aa, Artificial Sequence
  Description of Artificial Sequence: Synthetic peptide
  N-term H or Acetyl
  MOD_RES (4)..(4): Modified Cys
  MOD_RES (6)..(6): Ser or Phospho-Ser
  See specification as filed for detailed description of substitutions and preferred embodiments
LKRCASFKLFA

SEQ ID NO: 6036 - protein, 11 aa, Artificial Sequence
  Description of Artificial Sequence: Synthetic peptide
  N-term H or Acetyl
  MOD_RES (4)..(4): Modified Cys
  MOD_RES (6)..(6): Ser or Phospho-Ser
  See specification as filed for detailed description of substitutions and preferred embodiments
LKRCASFKNFA

SEQ ID NO: 6037 - protein, 11 aa, Artificial Sequence
  Description of Artificial Sequence: Synthetic peptide
  N-term H or Acetyl
  MOD_RES (4)..(4): Modified Cys
  MOD_RES (6)..(6): Ser or Phospho-Ser
  See specification as filed for detailed description of substitutions and preferred embodiments
LKRCASFKPFA

SEQ ID NO: 6038 - protein, 11 aa, Artificial Sequence
  Description of Artificial Sequence: Synthetic peptide
  N-term H or Acetyl
  MOD_RES (4)..(4): Modified Cys
  MOD_RES (6)..(6): Ser or Phospho-Ser
  See specification as filed for detailed description of substitutions and preferred embodiments
LKRCASFKQFA

SEQ ID NO: 6039 - protein, 11 aa, Artificial Sequence
  Description of Artificial Sequence: Synthetic peptide
  N-term H or Acetyl
  MOD_RES (4)..(4): Modified Cys
  MOD_RES (6)..(6): Ser or Phospho-Ser
  See specification as filed for detailed description of substitutions and preferred embodiments
LKRCASFKRFA

SEQ ID NO: 6040 - protein, 11 aa, Artificial Sequence
  Description of Artificial Sequence: Synthetic peptide
  N-term H or Acetyl
  MOD_RES (4)..(4): Modified Cys
  MOD_RES (6)..(6): Ser or Phospho-Ser
  See specification as filed for detailed description of substitutions and preferred embodiments
LKRCASFKVFA

SEQ ID NO: 6041 - protein, 11 aa, Artificial Sequence
  Description of Artificial Sequence: Synthetic peptide
  N-term H or Acetyl
  MOD_RES (4)..(4): Modified Cys
  MOD_RES (6)..(6): Ser or Phospho-Ser
  See specification as filed for detailed description of substitutions and preferred embodiments
LKRCASFKWFA

SEQ ID NO: 6042 - protein, 11 aa, Artificial Sequence
  Description of Artificial Sequence: Synthetic peptide
  N-term H or Acetyl
  MOD_RES (4)..(4): Modified Cys
  MOD_RES (6)..(6): Ser or Phospho-Ser
  See specification as filed for detailed description of substitutions and preferred embodiments
LKRCASFLKFA

SEQ ID NO: 6043 - protein, 11 aa, Artificial Sequence
  Description of Artificial Sequence: Synthetic peptide
  N-term H or Acetyl
  MOD_RES (4)..(4): Modified Cys
  MOD_RES (6)..(6): Ser or Phospho-Ser
  See specification as filed for detailed description of substitutions and preferred embodiments
LKRCASFNKFA

SEQ ID NO: 6044 - protein, 11 aa, Artificial Sequence
  Description of Artificial Sequence: Synthetic peptide
  N-term H or Acetyl
  MOD_RES (4)..(4): Modified Cys
  MOD_RES (6)..(6): Ser or Phospho-Ser
  See specification as filed for detailed description of substitutions and preferred embodiments
LKRCASFPKFA

SEQ ID NO: 6045 - protein, 11 aa, Artificial Sequence
  Description of Artificial Sequence: Synthetic peptide
  N-term H or Acetyl
  MOD_RES (4)..(4): Modified Cys
  MOD_RES (6)..(6): Ser or Phospho-Ser
  See specification as filed for detailed description of substitutions and preferred embodiments
LKRCASFQKFA

SEQ ID NO: 6046 - protein, 11 aa, Artificial Sequence
  Description of Artificial Sequence: Synthetic peptide
  N-term H or Acetyl
  MOD_RES (4)..(4): Modified Cys
  MOD_RES (6)..(6): Ser or Phospho-Ser
  See specification as filed for detailed description of substitutions and preferred embodiments
LKRCASFRKFA

SEQ ID NO: 6047 - protein, 11 aa, Artificial Sequence
  Description of Artificial Sequence: Synthetic peptide
  N-term H or Acetyl
  MOD_RES (4)..(4): Modified Cys
  MOD_RES (6)..(6): Ser or Phospho-Ser
  See specification as filed for detailed description of substitutions and preferred embodiments
LKRCASFVKFA

SEQ ID NO: 6048 - protein, 11 aa, Artificial Sequence
  Description of Artificial Sequence: Synthetic peptide
  N-term H or Acetyl
  MOD_RES (4)..(4): Modified Cys
  MOD_RES (6)..(6): Ser or Phospho-Ser
  See specification as filed for detailed description of substitutions and preferred embodiments
LKRCASFWKFA

SEQ ID NO: 6049 - protein, 11 aa, Artificial Sequence
  Description of Artificial Sequence: Synthetic peptide
  N-term H or Acetyl
  MOD_RES (4)..(4): Modified Cys
  MOD_RES (6)..(6): Ser or Phospho-Ser
  See specification as filed for detailed description of substitutions and preferred embodiments
LKRCASGKKFA

SEQ ID NO: 6050 - protein, 11 aa, Artificial Sequence
  Description of Artificial Sequence: Synthetic peptide
  N-term H or Acetyl
  MOD_RES (4)..(4): Modified Cys
  MOD_RES (6)..(6): Ser or Phospho-Ser
  See specification as filed for detailed description of substitutions and preferred embodiments
LKRCASHKKFA

SEQ ID NO: 6051 - protein, 11 aa, Artificial Sequence
  Description of Artificial Sequence: Synthetic peptide
  N-term H or Acetyl
  MOD_RES (4)..(4): Modified Cys
  MOD_RES (6)..(6): Ser or Phospho-Ser
  See specification as filed for detailed description of substitutions and preferred embodiments
LKRCASIKKFA

SEQ ID NO: 6052 - protein, 11 aa, Artificial Sequence
  Description of Artificial Sequence: Synthetic peptide
  N-term H or Acetyl
  MOD_RES (4)..(4): Modified Cys
  MOD_RES (6)..(6): Ser or Phospho-Ser
  See specification as filed for detailed description of substitutions and preferred embodiments
LKRCASKKKFA

SEQ ID NO: 6053 - protein, 11 aa, Artificial Sequence
  Description of Artificial Sequence: Synthetic peptide
  N-term H or Acetyl
  MOD_RES (4)..(4): Modified Cys
  MOD_RES (6)..(6): Ser or Phospho-Ser
  See specification as filed for detailed description of substitutions and preferred embodiments
LKRCASLKKFA

SEQ ID NO: 6054 - protein, 11 aa, Artificial Sequence
  Description of Artificial Sequence: Synthetic peptide
  N-term H or Acetyl
  MOD_RES (4)..(4): Modified Cys
  MOD_RES (6)..(6): Ser or Phospho-Ser
  See specification as filed for detailed description of substitutions and preferred embodiments
LKRCASNKKFA

SEQ ID NO: 6055 - protein, 11 aa, Artificial Sequence
  Description of Artificial Sequence: Synthetic peptide
  N-term H or Acetyl
  MOD_RES (4)..(4): Modified Cys
  MOD_RES (6)..(6): Ser or Phospho-Ser
  See specification as filed for detailed description of substitutions and preferred embodiments
LKRCASPKKFA

SEQ ID NO: 6056 - protein, 11 aa, Artificial Sequence
  Description of Artificial Sequence: Synthetic peptide
  N-term H or Acetyl
  MOD_RES (4)..(4): Modified Cys
  MOD_RES (6)..(6): Ser or Phospho-Ser
  See specification as filed for detailed description of substitutions and preferred embodiments
LKRCASQKKFA

SEQ ID NO: 6057 - protein, 11 aa, Artificial Sequence
  Description of Artificial Sequence: Synthetic peptide
  N-term H or Acetyl
  MOD_RES (4)..(4): Modified Cys
  MOD_RES (6)..(6): Ser or Phospho-Ser
  See specification as filed for detailed description of substitutions and preferred embodiments
LKRCASRKKFA

SEQ ID NO: 6058 - protein, 11 aa, Artificial Sequence
  Description of Artificial Sequence: Synthetic peptide
  N-term H or Acetyl
  MOD_RES (4)..(4): Modified Cys
  MOD_RES (6)..(6): Ser or Phospho-Ser
  See specification as filed for detailed description of substitutions and preferred embodiments
LKRCASVKKFA

SEQ ID NO: 6059 - protein, 11 aa, Artificial Sequence
  Description of Artificial Sequence: Synthetic peptide
  N-term H or Acetyl
  MOD_RES (4)..(4): Modified Cys
  MOD_RES (6)..(6): Ser or Phospho-Ser
  See specification as filed for detailed description of substitutions and preferred embodiments
LKRCASWKKFA

SEQ ID NO: 6060 - protein, 11 aa, Artificial Sequence
  Description of Artificial Sequence: Synthetic peptide
  N-term H or Acetyl
  MOD_RES (4)..(4): Modified Cys
  MOD_RES (6)..(6): Ser or Phospho-Ser
  See specification as filed for detailed description of substitutions and preferred embodiments
LKRCDSFKKFA

SEQ ID NO: 6061 - protein, 11 aa, Artificial Sequence
  Description of Artificial Sequence: Synthetic peptide
  N-term H or Acetyl
  MOD_RES (4)..(4): Modified Cys
  MOD_RES (6)..(6): Ser or Phospho-Ser
  See specification as filed for detailed description of substitutions and preferred embodiments
LKRCESFKKFA

SEQ ID NO: 6062 - protein, 11 aa, Artificial Sequence
  Description of Artificial Sequence: Synthetic peptide
  N-term H or Acetyl
  MOD_RES (4)..(4): Modified Cys
  MOD_RES (6)..(6): Ser or Phospho-Ser
  See specification as filed for detailed description of substitutions and preferred embodiments
LKRCFSFKKFA

SEQ ID NO: 6063 - protein, 11 aa, Artificial Sequence
  Description of Artificial Sequence: Synthetic peptide
  N-term H or Acetyl
  MOD_RES (4)..(4): Modified Cys
  MOD_RES (6)..(6): Ser or Phospho-Ser
  See specification as filed for detailed description of substitutions and preferred embodiments
LKRCGSFKKFA

SEQ ID NO: 6064 - protein, 11 aa, Artificial Sequence
  Description of Artificial Sequence: Synthetic peptide
  N-term H or Acetyl
  MOD_RES (4)..(4): Modified Cys
  MOD_RES (6)..(6): Ser or Phospho-Ser
  See specification as filed for detailed description of substitutions and preferred embodiments
LKRCHSFKKFA

SEQ ID NO: 6065 - protein, 11 aa, Artificial Sequence
  Description of Artificial Sequence: Synthetic peptide
  N-term H or Acetyl
  MOD_RES (4)..(4): Modified Cys
  MOD_RES (6)..(6): Ser or Phospho-Ser
  See specification as filed for detailed description of substitutions and preferred embodiments
LKRCISFKKFA

SEQ ID NO: 6066 - protein, 11 aa, Artificial Sequence
  Description of Artificial Sequence: Synthetic peptide
  N-term H or Acetyl
  MOD_RES (4)..(4): Modified Cys
  MOD_RES (6)..(6): Ser or Phospho-Ser
  See specification as filed for detailed description of substitutions and preferred embodiments
LKRCKSFKKFA

SEQ ID NO: 6067 - protein, 11 aa, Artificial Sequence
  Description of Artificial Sequence: Synthetic peptide
  N-term H or Acetyl
  MOD_RES (4)..(4): Modified Cys
  MOD_RES (6)..(6): Ser or Phospho-Ser
  See specification as filed for detailed description of substitutions and preferred embodiments
LKRCLSFKKFA

SEQ ID NO: 6068 - protein, 11 aa, Artificial Sequence
  Description of Artificial Sequence: Synthetic peptide
  N-term H or Acetyl
  MOD_RES (4)..(4): Modified Cys
  MOD_RES (6)..(6): Ser or Phospho-Ser
  See specification as filed for detailed description of substitutions and preferred embodiments
LKRCNSFKKFA

SEQ ID NO: 6069 - protein, 11 aa, Artificial Sequence
  Description of Artificial Sequence: Synthetic peptide
  N-term H or Acetyl
  MOD_RES (4)..(4): Modified Cys
  MOD_RES (6)..(6): Ser or Phospho-Ser
  See specification as filed for detailed description of substitutions and preferred embodiments
LKRCPSFKKFA

SEQ ID NO: 6070 - protein, 11 aa, Artificial Sequence
  Description of Artificial Sequence: Synthetic peptide
  N-term H or Acetyl
  MOD_RES (4)..(4): Modified Cys
  MOD_RES (6)..(6): Ser or Phospho-Ser
  See specification as filed for detailed description of substitutions and preferred embodiments
LKRCQSFKKFA

SEQ ID NO: 6071 - protein, 11 aa, Artificial Sequence
  Description of Artificial Sequence: Synthetic peptide
  N-term H or Acetyl
  MOD_RES (4)..(4): Modified Cys
  MOD_RES (6)..(6): Ser or Phospho-Ser
  See specification as filed for detailed description of substitutions and preferred embodiments
LKRCRSFKKFA

SEQ ID NO: 6072 - protein, 11 aa, Artificial Sequence
  Description of Artificial Sequence: Synthetic peptide
  N-term H or Acetyl
  MOD_RES (4)..(4): Modified Cys
  MOD_RES (6)..(6): Ser or Phospho-Ser
  See specification as filed for detailed description of substitutions and preferred embodiments
LKRCVSFKKFA

SEQ ID NO: 6073 - protein, 11 aa, Artificial Sequence
  Description of Artificial Sequence: Synthetic peptide
  N-term H or Acetyl
  MOD_RES (4)..(4): Modified Cys
  MOD_RES (6)..(6): Ser or Phospho-Ser
  See specification as filed for detailed description of substitutions and preferred embodiments
LKRCWSFKKFA

SEQ ID NO: 6074 - protein, 11 aa, Artificial Sequence
  Description of Artificial Sequence: Synthetic peptide
  N-term H or Acetyl
  MOD_RES (4)..(4): Modified Cys
  MOD_RES (6)..(6): Ser or Phospho-Ser
  See specification as filed for detailed description of substitutions and preferred embodiments
LKVCASFKKFA

SEQ ID NO: 6075 - protein, 11 aa, Artificial Sequence
  Description of Artificial Sequence: Synthetic peptide
  N-term H or Acetyl
  MOD_RES (4)..(4): Modified Cys
  MOD_RES (6)..(6): Ser or Phospho-Ser
  See specification as filed for detailed description of substitutions and preferred embodiments
LKWCASFKKFA

SEQ ID NO: 6076 - protein, 11 aa, Artificial Sequence
  Description of Artificial Sequence: Synthetic peptide
  N-term H or Acetyl
  MOD_RES (4)..(4): Modified Cys
  MOD_RES (6)..(6): Ser or Phospho-Ser
  See specification as filed for detailed description of substitutions and preferred embodiments
LLRCASFKKFA

SEQ ID NO: 6077 - protein, 11 aa, Artificial Sequence
  Description of Artificial Sequence: Synthetic peptide
  N-term H or Acetyl
  MOD_RES (4)..(4): Modified Cys
  MOD_RES (6)..(6): Ser or Phospho-Ser
  See specification as filed for detailed description of substitutions and preferred embodiments
LNRCASFKKFA

SEQ ID NO: 6078 - protein, 11 aa, Artificial Sequence
  Description of Artificial Sequence: Synthetic peptide
  N-term H or Acetyl
  MOD_RES (4)..(4): Modified Cys
  MOD_RES (6)..(6): Ser or Phospho-Ser
  See specification as filed for detailed description of substitutions and preferred embodiments
LPRCASFKKFA

SEQ ID NO: 6079 - protein, 11 aa, Artificial Sequence
  Description of Artificial Sequence: Synthetic peptide
  N-term H or Acetyl
  MOD_RES (4)..(4): Modified Cys
  MOD_RES (6)..(6): Ser or Phospho-Ser
  See specification as filed for detailed description of substitutions and preferred embodiments
LQRCASFKKFA

SEQ ID NO: 6080 - protein, 11 aa, Artificial Sequence
  Description of Artificial Sequence: Synthetic peptide
  N-term H or Acetyl
  MOD_RES (4)..(4): Modified Cys
  MOD_RES (6)..(6): Ser or Phospho-Ser
  See specification as filed for detailed description of substitutions and preferred embodiments
LRRCASFKKFA

SEQ ID NO: 6081 - protein, 11 aa, Artificial Sequence
  Description of Artificial Sequence: Synthetic peptide
  N-term H or Acetyl
  MOD_RES (4)..(4): Modified Cys
  MOD_RES (6)..(6): Ser or Phospho-Ser
  See specification as filed for detailed description of substitutions and preferred embodiments
LVRCASFKKFA

SEQ ID NO: 6082 - protein, 11 aa, Artificial Sequence
  Description of Artificial Sequence: Synthetic peptide
  N-term H or Acetyl
  MOD_RES (4)..(4): Modified Cys
  MOD_RES (6)..(6): Ser or Phospho-Ser
  See specification as filed for detailed description of substitutions and preferred embodiments
LWRCASFKKFA

SEQ ID NO: 6083 - protein, 11 aa, Artificial Sequence
  Description of Artificial Sequence: Synthetic peptide
  N-term H or Acetyl
  MOD_RES (4)..(4): Modified Cys
  MOD_RES (6)..(6): Ser or Phospho-Ser
  See specification as filed for detailed description of substitutions and preferred embodiments
NKRCASFKKFA

SEQ ID NO: 6084 - protein, 11 aa, Artificial Sequence
  Description of Artificial Sequence: Synthetic peptide
  N-term H or Acetyl
  MOD_RES (4)..(4): Modified Cys
  MOD_RES (6)..(6): Ser or Phospho-Ser
  See specification as filed for detailed description of substitutions and preferred embodiments
PKRCASFKKFA

SEQ ID NO: 6085 - protein, 11 aa, Artificial Sequence
  Description of Artificial Sequence: Synthetic peptide
  N-term H or Acetyl
  MOD_RES (4)..(4): Modified Cys
  MOD_RES (6)..(6): Ser or Phospho-Ser
  See specification as filed for detailed description of substitutions and preferred embodiments
QKRCASFKKFA

SEQ ID NO: 6086 - protein, 11 aa, Artificial Sequence
  Description of Artificial Sequence: Synthetic peptide
  N-term H or Acetyl
  MOD_RES (4)..(4): Modified Cys
  MOD_RES (6)..(6): Ser or Phospho-Ser
  See specification as filed for detailed description of substitutions and preferred embodiments
RKRCASFKKFA

SEQ ID NO: 6087 - protein, 11 aa, Artificial Sequence
  Description of Artificial Sequence: Synthetic peptide
  N-term H or Acetyl
  MOD_RES (4)..(4): Modified Cys
  MOD_RES (6)..(6): Ser or Phospho-Ser
  See specification as filed for detailed description of substitutions and preferred embodiments
VKRCASFKKFA

SEQ ID NO: 6088 - protein, 11 aa, Artificial Sequence
  Description of Artificial Sequence: Synthetic peptide
  N-term H or Acetyl
  MOD_RES (4)..(4): Modified Cys
  MOD_RES (6)..(6): Ser or Phospho-Ser
  See specification as filed for detailed description of substitutions and preferred embodiments
WKRCASFKKFA

SEQ ID NO: 6089 - protein, 7 aa, Artificial Sequence
  Description of Artificial Sequence: Synthetic peptide
  N-term H or Acetyl
  MOD_RES (1)..(1): Modified Cys
  MOD_RES (4)..(4): Ser or Phospho-Ser
  See specification as filed for detailed description of substitutions and preferred embodiments
CPGSFRR

SEQ ID NO: 6090 - protein, 6 aa, Artificial Sequence
  Description of Artificial Sequence: Synthetic peptide
  N-term H or Acetyl
  MOD_RES (1)..(1): Modified Cys
  MOD_RES (3)..(3): Ser or Phospho-Ser
  See specification as filed for detailed description of substitutions and preferred embodiments
CASFRR

SEQ ID NO: 6091 - protein, 8 aa, Artificial Sequence
  Description of Artificial Sequence: Synthetic peptide
  N-term H or Acetyl
  MOD_RES (1)..(1): Modified Cys
  MOD_RES (2)..(2): Leu or Nle (i.e. isomer of Leucine)
  MOD_RES (4)..(4): Ser or Phospho-Ser
  See specification as filed for detailed description of substitutions and preferred embodiments
CLGSFRRR

SEQ ID NO: 6092 - protein, 8 aa, Artificial Sequence
  Description of Artificial Sequence: Synthetic peptide
  N-term H or Acetyl
  MOD_RES (1)..(1): Modified Cys
  MOD_RES (4)..(4): Ser or Phospho-Ser
  See specification as filed for detailed description of substitutions and preferred embodiments
CAGSFRRR

SEQ ID NO: 6093 - protein, 8 aa, Artificial Sequence
  Description of Artificial Sequence: Synthetic peptide
  N-term H or Acetyl
  MOD_RES (1)..(1): Modified Cys
  MOD_RES (4)..(4): Ser or Phospho-Ser
  See specification as filed for detailed description of substitutions and preferred embodiments
CDGSFRRR

SEQ ID NO: 6094 - protein, 8 aa, Artificial Sequence
  Description of Artificial Sequence: Synthetic peptide
  N-term H or Acetyl
  MOD_RES (1)..(1): Modified Cys
  MOD_RES (4)..(4): Ser or Phospho-Ser
  See specification as filed for detailed description of substitutions and preferred embodiments
CEGSFRRR

SEQ ID NO: 6095 - protein, 8 aa, Artificial Sequence
  Description of Artificial Sequence: Synthetic peptide
  N-term H or Acetyl
  MOD_RES (1)..(1): Modified Cys
  MOD_RES (4)..(4): Ser or Phospho-Ser
  See specification as filed for detailed description of substitutions and preferred embodiments
CFGSFRRR

SEQ ID NO: 6096 - protein, 8 aa, Artificial Sequence
  Description of Artificial Sequence: Synthetic peptide
  N-term H or Acetyl
  MOD_RES (1)..(1): Modified Cys
  MOD_RES (4)..(4): Ser or Phospho-Ser
  See specification as filed for detailed description of substitutions and preferred embodiments
CGGSFRRR

SEQ ID NO: 6097 - protein, 8 aa, Artificial Sequence
  Description of Artificial Sequence: Synthetic peptide
  N-term H or Acetyl
  MOD_RES (1)..(1): Modified Cys
  MOD_RES (4)..(4): Ser or Phospho-Ser
  See specification as filed for detailed description of substitutions and preferred embodiments
CHGSFRRR

SEQ ID NO: 6098 - protein, 8 aa, Artificial Sequence
  Description of Artificial Sequence: Synthetic peptide
  N-term H or Acetyl
  MOD_RES (1)..(1): Modified Cys
  MOD_RES (4)..(4): Ser or Phospho-Ser
  See specification as filed for detailed description of substitutions and preferred embodiments
CIGSFRRR

SEQ ID NO: 6099 - protein, 8 aa, Artificial Sequence
  Description of Artificial Sequence: Synthetic peptide
  N-term H or Acetyl
  MOD_RES (1)..(1): Modified Cys
  MOD_RES (4)..(4): Ser or Phospho-Ser
  See specification as filed for detailed description of substitutions and preferred embodiments
CKGSFRRR

SEQ ID NO: 6100 - protein, 8 aa, Artificial Sequence
  Description of Artificial Sequence: Synthetic peptide
  N-term H or Acetyl
  MOD_RES (1)..(1): Modified Cys
  MOD_RES (4)..(4): Ser or Phospho-Ser
  See specification as filed for detailed description of substitutions and preferred embodiments
CLGSFRRR

SEQ ID NO: 6101 - protein, 8 aa, Artificial Sequence
  Description of Artificial Sequence: Synthetic peptide
  N-term H or Acetyl
  MOD_RES (1)..(1): Modified Cys
  MOD_RES (4)..(4): Ser or Phospho-Ser
  See specification as filed for detailed description of substitutions and preferred embodiments
CNGSFRRR

SEQ ID NO: 6102 - protein, 8 aa, Artificial Sequence
  Description of Artificial Sequence: Synthetic peptide
  N-term H or Acetyl
  MOD_RES (1)..(1): Modified Cys
  MOD_RES (3)..(3): Leu or Nle (i.e. isomer of Leucine)
  MOD_RES (4)..(4): Ser or Phospho-Ser
  See specification as filed for detailed description of substitutions and preferred embodiments
CPLSFRRR

SEQ ID NO: 6103 - protein, 8 aa, Artificial Sequence
  Description of Artificial Sequence: Synthetic peptide
  N-term H or Acetyl
  MOD_RES (1)..(1): Modified Cys
  MOD_RES (4)..(4): Ser or Phospho-Ser
  See specification as filed for detailed description of substitutions and preferred embodiments
CPASFRRR

SEQ ID NO: 6104 - protein, 8 aa, Artificial Sequence
  Description of Artificial Sequence: Synthetic peptide
  N-term H or Acetyl
  MOD_RES (1)..(1): Modified Cys
  MOD_RES (4)..(4): Ser or Phospho-Ser
  See specification as filed for detailed description of substitutions and preferred embodiments
CPDSFRRR

SEQ ID NO: 6105 - protein, 8 aa, Artificial Sequence
  Description of Artificial Sequence: Synthetic peptide
  N-term H or Acetyl
  MOD_RES (1)..(1): Modified Cys
  MOD_RES (4)..(4): Ser or Phospho-Ser
  See specification as filed for detailed description of substitutions and preferred embodiments
CPESFRRR

SEQ ID NO: 6106 - protein, 8 aa, Artificial Sequence
  Description of Artificial Sequence: Synthetic peptide
  N-term H or Acetyl
  MOD_RES (1)..(1): Modified Cys
  MOD_RES (4)..(4): Ser or Phospho-Ser
  See specification as filed for detailed description of substitutions and preferred embodiments
CPFSFRRR

SEQ ID NO: 6107 - protein, 8 aa, Artificial Sequence
  Description of Artificial Sequence: Synthetic peptide
  N-term H or Acetyl
  MOD_RES (1)..(1): Modified Cys
  MOD_RES (4)..(4): Ser or Phospho-Ser
  MOD_RES (5)..(5): Leu or Nle (i.e. isomer of Leucine)
  See specification as filed for detailed description of substitutions and preferred embodiments
CPGSLRRR

SEQ ID NO: 6108 - protein, 8 aa, Artificial Sequence
  Description of Artificial Sequence: Synthetic peptide
  N-term H or Acetyl
  MOD_RES (1)..(1): Modified Cys
  MOD_RES (4)..(4): Ser or Phospho-Ser
  See specification as filed for detailed description of substitutions and preferred embodiments
CPGSARRR

SEQ ID NO: 6109 - protein, 8 aa, Artificial Sequence
  Description of Artificial Sequence: Synthetic peptide
  N-term H or Acetyl
  MOD_RES (1)..(1): Modified Cys
  MOD_RES (4)..(4): Ser or Phospho-Ser
  See specification as filed for detailed description of substitutions and preferred embodiments
CPGSDRRR

SEQ ID NO: 6110 - protein, 8 aa, Artificial Sequence
  Description of Artificial Sequence: Synthetic peptide
  N-term H or Acetyl
  MOD_RES (1)..(1): Modified Cys
  MOD_RES (4)..(4): Ser or Phospho-Ser
  See specification as filed for detailed description of substitutions and preferred embodiments
CPGSERRR

SEQ ID NO: 6111 - protein, 8 aa, Artificial Sequence
  Description of Artificial Sequence: Synthetic peptide
  N-term H or Acetyl
  MOD_RES (1)..(1): Modified Cys
  MOD_RES (4)..(4): Ser or Phospho-Ser
  MOD_RES (6)..(6): Leu or Nle (i.e. isomer of Leucine)
  See specification as filed for detailed description of substitutions and preferred embodiments
CPGSFLRR

SEQ ID NO: 6112 - protein, 8 aa, Artificial Sequence
  Description of Artificial Sequence: Synthetic peptide
  N-term H or Acetyl
  MOD_RES (1)..(1): Modified Cys
  MOD_RES (4)..(4): Ser or Phospho-Ser
  See specification as filed for detailed description of substitutions and preferred embodiments
CPGSFARR

SEQ ID NO: 6113 - protein, 8 aa, Artificial Sequence
  Description of Artificial Sequence: Synthetic peptide
  N-term H or Acetyl
  MOD_RES (1)..(1): Modified Cys
  MOD_RES (4)..(4): Ser or Phospho-Ser
  See specification as filed for detailed description of substitutions and preferred embodiments
CPGSFDRR

SEQ ID NO: 6114 - protein, 8 aa, Artificial Sequence
  Description of Artificial Sequence: Synthetic peptide
  N-term H or Acetyl
  MOD_RES (1)..(1): Modified Cys
  MOD_RES (4)..(4): Ser or Phospho-Ser
  See specification as filed for detailed description of substitutions and preferred embodiments
CPGSFERR

SEQ ID NO: 6115 - protein, 8 aa, Artificial Sequence
  Description of Artificial Sequence: Synthetic peptide
  N-term H or Acetyl
  MOD_RES (1)..(1): Modified Cys
  MOD_RES (4)..(4): Ser or Phospho-Ser
  See specification as filed for detailed description of substitutions and preferred embodiments
CPGSFFRR

SEQ ID NO: 6116 - protein, 8 aa, Artificial Sequence
  Description of Artificial Sequence: Synthetic peptide
  N-term H or Acetyl
  MOD_RES (1)..(1): Modified Cys
  MOD_RES (4)..(4): Ser or Phospho-Ser
  See specification as filed for detailed description of substitutions and preferred embodiments
CPGSFGRR

SEQ ID NO: 6117 - protein, 8 aa, Artificial Sequence
  Description of Artificial Sequence: Synthetic peptide
  N-term H or Acetyl
  MOD_RES (1)..(1): Modified Cys
  MOD_RES (4)..(4): Ser or Phospho-Ser
  See specification as filed for detailed description of substitutions and preferred embodiments
CPGSFHRR

SEQ ID NO: 6118 - protein, 8 aa, Artificial Sequence
  Description of Artificial Sequence: Synthetic peptide
  N-term H or Acetyl
  MOD_RES (1)..(1): Modified Cys
  MOD_RES (4)..(4): Ser or Phospho-Ser
  See specification as filed for detailed description of substitutions and preferred embodiments
CPGSFIRR

SEQ ID NO: 6119 - protein, 8 aa, Artificial Sequence
  Description of Artificial Sequence: Synthetic peptide
  N-term H or Acetyl
  MOD_RES (1)..(1): Modified Cys
  MOD_RES (4)..(4): Ser or Phospho-Ser
  See specification as filed for detailed description of substitutions and preferred embodiments
CPGSFKRR

SEQ ID NO: 6120 - protein, 8 aa, Artificial Sequence
  Description of Artificial Sequence: Synthetic peptide
  N-term H or Acetyl
  MOD_RES (1)..(1): Modified Cys
  MOD_RES (4)..(4): Ser or Phospho-Ser
  See specification as filed for detailed description of substitutions and preferred embodiments
CPGSFLRR

SEQ ID NO: 6121 - protein, 8 aa, Artificial Sequence
  Description of Artificial Sequence: Synthetic peptide
  N-term H or Acetyl
  MOD_RES (1)..(1): Modified Cys
  MOD_RES (4)..(4): Ser or Phospho-Ser
  See specification as filed for detailed description of substitutions and preferred embodiments
CPGSFNRR

SEQ ID NO: 6122 - protein, 8 aa, Artificial Sequence
  Description of Artificial Sequence: Synthetic peptide
  N-term H or Acetyl
  MOD_RES (1)..(1): Modified Cys
  MOD_RES (4)..(4): Ser or Phospho-Ser
  See specification as filed for detailed description of substitutions and preferred embodiments
CPGSFPRR

SEQ ID NO: 6123 - protein, 8 aa, Artificial Sequence
  Description of Artificial Sequence: Synthetic peptide
  N-term H or Acetyl
  MOD_RES (1)..(1): Modified Cys
  MOD_RES (4)..(4): Ser or Phospho-Ser
  See specification as filed for detailed description of substitutions and preferred embodiments
CPGSFQRR

SEQ ID NO: 6124 - protein, 8 aa, Artificial Sequence
  Description of Artificial Sequence: Synthetic peptide
  N-term H or Acetyl
  MOD_RES (1)..(1): Modified Cys
  MOD_RES (4)..(4): Ser or Phospho-Ser
  MOD_RES (7)..(7): Leu or Nle (i.e. isomer of Leucine)
  See specification as filed for detailed description of substitutions and preferred embodiments
CPGSFRLR

SEQ ID NO: 6125 - protein, 8 aa, Artificial Sequence
  Description of Artificial Sequence: Synthetic peptide
  N-term H or Acetyl
  MOD_RES (1)..(1): Modified Cys
  MOD_RES (4)..(4): Ser or Phospho-Ser
  See specification as filed for detailed description of substitutions and preferred embodiments
CPGSFRAR

SEQ ID NO: 6126 - protein, 8 aa, Artificial Sequence
  Description of Artificial Sequence: Synthetic peptide
  N-term H or Acetyl
  MOD_RES (1)..(1): Modified Cys
  MOD_RES (4)..(4): Ser or Phospho-Ser
  See specification as filed for detailed description of substitutions and preferred embodiments
CPGSFRDR

SEQ ID NO: 6127 - protein, 8 aa, Artificial Sequence
  Description of Artificial Sequence: Synthetic peptide
  N-term H or Acetyl
  MOD_RES (1)..(1): Modified Cys
  MOD_RES (4)..(4): Ser or Phospho-Ser
  See specification as filed for detailed description of substitutions and preferred embodiments
CPGSFRER

SEQ ID NO: 6128 - protein, 8 aa, Artificial Sequence
  Description of Artificial Sequence: Synthetic peptide
  N-term H or Acetyl
  MOD_RES (1)..(1): Modified Cys
  MOD_RES (4)..(4): Ser or Phospho-Ser
  See specification as filed for detailed description of substitutions and preferred embodiments
CPGSFRFR

SEQ ID NO: 6129 - protein, 8 aa, Artificial Sequence
  Description of Artificial Sequence: Synthetic peptide
  N-term H or Acetyl
  MOD_RES (1)..(1): Modified Cys
  MOD_RES (4)..(4): Ser or Phospho-Ser
  See specification as filed for detailed description of substitutions and preferred embodiments
CPGSFRGR

SEQ ID NO: 6130 - protein, 8 aa, Artificial Sequence
  Description of Artificial Sequence: Synthetic peptide
  N-term H or Acetyl
  MOD_RES (1)..(1): Modified Cys
  MOD_RES (4)..(4): Ser or Phospho-Ser
  See specification as filed for detailed description of substitutions and preferred embodiments
CPGSFRHR

SEQ ID NO: 6131 - protein, 8 aa, Artificial Sequence
  Description of Artificial Sequence: Synthetic peptide
  N-term H or Acetyl
  MOD_RES (1)..(1): Modified Cys
  MOD_RES (4)..(4): Ser or Phospho-Ser
  See specification as filed for detailed description of substitutions and preferred embodiments
CPGSFRIR

SEQ ID NO: 6132 - protein, 8 aa, Artificial Sequence
  Description of Artificial Sequence: Synthetic peptide
  N-term H or Acetyl
  MOD_RES (1)..(1): Modified Cys
  MOD_RES (4)..(4): Ser or Phospho-Ser
  See specification as filed for detailed description of substitutions and preferred embodiments
CPGSFRKR

SEQ ID NO: 6133 - protein, 8 aa, Artificial Sequence
  Description of Artificial Sequence: Synthetic peptide
  N-term H or Acetyl
  MOD_RES (1)..(1): Modified Cys
  MOD_RES (4)..(4): Ser or Phospho-Ser
  See specification as filed for detailed description of substitutions and preferred embodiments
CPGSFRLR

SEQ ID NO: 6134 - protein, 8 aa, Artificial Sequence
  Description of Artificial Sequence: Synthetic peptide
  N-term H or Acetyl
  MOD_RES (1)..(1): Modified Cys
  MOD_RES (4)..(4): Ser or Phospho-Ser
  See specification as filed for detailed description of substitutions and preferred embodiments
CPGSFRNR

SEQ ID NO: 6135 - protein, 8 aa, Artificial Sequence
  Description of Artificial Sequence: Synthetic peptide
  N-term H or Acetyl
  MOD_RES (1)..(1): Modified Cys
  MOD_RES (4)..(4): Ser or Phospho-Ser
  See specification as filed for detailed description of substitutions and preferred embodiments
CPGSFRPR

SEQ ID NO: 6136 - protein, 8 aa, Artificial Sequence
  Description of Artificial Sequence: Synthetic peptide
  N-term H or Acetyl
  MOD_RES (1)..(1): Modified Cys
  MOD_RES (4)..(4): Ser or Phospho-Ser
  See specification as filed for detailed description of substitutions and preferred embodiments
CPGSFRQR

SEQ ID NO: 6137 - protein, 8 aa, Artificial Sequence
  Description of Artificial Sequence: Synthetic peptide
  N-term H or Acetyl
  MOD_RES (1)..(1): Modified Cys
  MOD_RES (4)..(4): Ser or Phospho-Ser
  MOD_RES (8)..(8): Leu or Nle (i.e. isomer of Leucine)
  See specification as filed for detailed description of substitutions and preferred embodiments
CPGSFRRL

SEQ ID NO: 6138 - protein, 8 aa, Artificial Sequence
  Description of Artificial Sequence: Synthetic peptide
  N-term H or Acetyl
  MOD_RES (1)..(1): Modified Cys
  MOD_RES (4)..(4): Ser or Phospho-Ser
  See specification as filed for detailed description of substitutions and preferred embodiments
CPGSFRRA

SEQ ID NO: 6139 - protein, 8 aa, Artificial Sequence
  Description of Artificial Sequence: Synthetic peptide
  N-term H or Acetyl
  MOD_RES (1)..(1): Modified Cys
  MOD_RES (4)..(4): Ser or Phospho-Ser
  See specification as filed for detailed description of substitutions and preferred embodiments
CPGSFRRD

SEQ ID NO: 6140 - protein, 8 aa, Artificial Sequence
  Description of Artificial Sequence: Synthetic peptide
  N-term H or Acetyl
  MOD_RES (1)..(1): Modified Cys
  MOD_RES (4)..(4): Ser or Phospho-Ser
  See specification as filed for detailed description of substitutions and preferred embodiments
CPGSFRRE

SEQ ID NO: 6141 - protein, 8 aa, Artificial Sequence
  Description of Artificial Sequence: Synthetic peptide
  N-term H or Acetyl
  MOD_RES (1)..(1): Modified Cys
  MOD_RES (4)..(4): Ser or Phospho-Ser
  See specification as filed for detailed description of substitutions and preferred embodiments
CPGSFRRF

SEQ ID NO: 6142 - protein, 8 aa, Artificial Sequence
  Description of Artificial Sequence: Synthetic peptide
  N-term H or Acetyl
  MOD_RES (1)..(1): Modified Cys
  MOD_RES (4)..(4): Ser or Phospho-Ser
  See specification as filed for detailed description of substitutions and preferred embodiments
CPGSFRRG

SEQ ID NO: 6143 - protein, 8 aa, Artificial Sequence
  Description of Artificial Sequence: Synthetic peptide
  N-term H or Acetyl
  MOD_RES (1)..(1): Modified Cys
  MOD_RES (4)..(4): Ser or Phospho-Ser
  See specification as filed for detailed description of substitutions and preferred embodiments
CPGSFRRH

SEQ ID NO: 6144 - protein, 8 aa, Artificial Sequence
  Description of Artificial Sequence: Synthetic peptide
  N-term H or Acetyl
  MOD_RES (1)..(1): Modified Cys
  MOD_RES (4)..(4): Ser or Phospho-Ser
  See specification as filed for detailed description of substitutions and preferred embodiments
CPGSFRRI

SEQ ID NO: 6145 - protein, 8 aa, Artificial Sequence
  Description of Artificial Sequence: Synthetic peptide
  N-term H or Acetyl
  MOD_RES (1)..(1): Modified Cys
  MOD_RES (4)..(4): Ser or Phospho-Ser
  See specification as filed for detailed description of substitutions and preferred embodiments
CPGSFRRK

SEQ ID NO: 6146 - protein, 8 aa, Artificial Sequence
  Description of Artificial Sequence: Synthetic peptide
  N-term H or Acetyl
  MOD_RES (1)..(1): Modified Cys
  MOD_RES (4)..(4): Ser or Phospho-Ser
  See specification as filed for detailed description of substitutions and preferred embodiments
CPGSFRRL

SEQ ID NO: 6147 - protein, 8 aa, Artificial Sequence
  Description of Artificial Sequence: Synthetic peptide
  N-term H or Acetyl
  MOD_RES (1)..(1): Modified Cys
  MOD_RES (4)..(4): Ser or Phospho-Ser
  See specification as filed for detailed description of substitutions and preferred embodiments
CPGSFRRN

SEQ ID NO: 6148 - protein, 8 aa, Artificial Sequence
  Description of Artificial Sequence: Synthetic peptide
  N-term H or Acetyl
  MOD_RES (1)..(1): Modified Cys
  MOD_RES (4)..(4): Ser or Phospho-Ser
  See specification as filed for detailed description of substitutions and preferred embodiments
CPGSFRRP

SEQ ID NO: 6149 - protein, 8 aa, Artificial Sequence
  Description of Artificial Sequence: Synthetic peptide
  N-term H or Acetyl
  MOD_RES (1)..(1): Modified Cys
  MOD_RES (4)..(4): Ser or Phospho-Ser
  See specification as filed for detailed description of substitutions and preferred embodiments
CPGSFRRQ

SEQ ID NO: 6150 - protein, 8 aa, Artificial Sequence
  Description of Artificial Sequence: Synthetic peptide
  N-term H or Acetyl
  MOD_RES (1)..(1): Modified Cys
  MOD_RES (4)..(4): Ser or Phospho-Ser
  See specification as filed for detailed description of substitutions and preferred embodiments
CPGSFRRR

SEQ ID NO: 6151 - protein, 8 aa, Artificial Sequence
  Description of Artificial Sequence: Synthetic peptide
  N-term H or Acetyl
  MOD_RES (1)..(1): Modified Cys
  MOD_RES (4)..(4): Ser or Phospho-Ser
  See specification as filed for detailed description of substitutions and preferred embodiments
CPGSFRRV

SEQ ID NO: 6152 - protein, 8 aa, Artificial Sequence
  Description of Artificial Sequence: Synthetic peptide
  N-term H or Acetyl
  MOD_RES (1)..(1): Modified Cys
  MOD_RES (4)..(4): Ser or Phospho-Ser
  See specification as filed for detailed description of substitutions and preferred embodiments
CPGSFRRW

SEQ ID NO: 6153 - protein, 8 aa, Artificial Sequence
  Description of Artificial Sequence: Synthetic peptide
  N-term H or Acetyl
  MOD_RES (1)..(1): Modified Cys
  MOD_RES (4)..(4): Ser or Phospho-Ser
  See specification as filed for detailed description of substitutions and preferred embodiments
CPGSFRVR

SEQ ID NO: 6154 - protein, 8 aa, Artificial Sequence
  Description of Artificial Sequence: Synthetic peptide
  N-term H or Acetyl
  MOD_RES (1)..(1): Modified Cys
  MOD_RES (4)..(4): Ser or Phospho-Ser
  See specification as filed for detailed description of substitutions and preferred embodiments
CPGSFRWR

SEQ ID NO: 6155 - protein, 8 aa, Artificial Sequence
  Description of Artificial Sequence: Synthetic peptide
  N-term H or Acetyl
  MOD_RES (1)..(1): Modified Cys
  MOD_RES (4)..(4): Ser or Phospho-Ser
  See specification as filed for detailed description of substitutions and preferred embodiments
CPGSFVRR

SEQ ID NO: 6156 - protein, 8 aa, Artificial Sequence
  Description of Artificial Sequence: Synthetic peptide
  N-term H or Acetyl
  MOD_RES (1)..(1): Modified Cys
  MOD_RES (4)..(4): Ser or Phospho-Ser
  See specification as filed for detailed description of substitutions and preferred embodiments
CPGSFWRR

SEQ ID NO: 6157 - protein, 8 aa, Artificial Sequence
  Description of Artificial Sequence: Synthetic peptide
  N-term H or Acetyl
  MOD_RES (1)..(1): Modified Cys
  MOD_RES (4)..(4): Ser or Phospho-Ser
  See specification as filed for detailed description of substitutions and preferred embodiments
CPGSGRRR

SEQ ID NO: 6158 - protein, 8 aa, Artificial Sequence
  Description of Artificial Sequence: Synthetic peptide
  N-term H or Acetyl
  MOD_RES (1)..(1): Modified Cys
  MOD_RES (4)..(4): Ser or Phospho-Ser
  See specification as filed for detailed description of substitutions and preferred embodiments
CPGSHRRR

SEQ ID NO: 6159 - protein, 8 aa, Artificial Sequence
  Description of Artificial Sequence: Synthetic peptide
  N-term H or Acetyl
  MOD_RES (1)..(1): Modified Cys
  MOD_RES (4)..(4): Ser or Phospho-Ser
  See specification as filed for detailed description of substitutions and preferred embodiments
CPGSIRRR

SEQ ID NO: 6160 - protein, 8 aa, Artificial Sequence
  Description of Artificial Sequence: Synthetic peptide
  N-term H or Acetyl
  MOD_RES (1)..(1): Modified Cys
  MOD_RES (4)..(4): Ser or Phospho-Ser
  See specification as filed for detailed description of substitutions and preferred embodiments
CPGSKRRR

SEQ ID NO: 6161 - protein, 8 aa, Artificial Sequence
  Description of Artificial Sequence: Synthetic peptide
  N-term H or Acetyl
  MOD_RES (1)..(1): Modified Cys
  MOD_RES (4)..(4): Ser or Phospho-Ser
  See specification as filed for detailed description of substitutions and preferred embodiments
CPGSLRRR

SEQ ID NO: 6162 - protein, 8 aa, Artificial Sequence
  Description of Artificial Sequence: Synthetic peptide
  N-term H or Acetyl
  MOD_RES (1)..(1): Modified Cys
  MOD_RES (4)..(4): Ser or Phospho-Ser
  See specification as filed for detailed description of substitutions and preferred embodiments
CPGSNRRR

SEQ ID NO: 6163 - protein, 8 aa, Artificial Sequence
  Description of Artificial Sequence: Synthetic peptide
  N-term H or Acetyl
  MOD_RES (1)..(1): Modified Cys
  MOD_RES (4)..(4): Ser or Phospho-Ser
  See specification as filed for detailed description of substitutions and preferred embodiments
CPGSPRRR

SEQ ID NO: 6164 - protein, 8 aa, Artificial Sequence
  Description of Artificial Sequence: Synthetic peptide
  N-term H or Acetyl
  MOD_RES (1)..(1): Modified Cys
  MOD_RES (4)..(4): Ser or Phospho-Ser
  See specification as filed for detailed description of substitutions and preferred embodiments
CPGSQRRR

SEQ ID NO: 6165 - protein, 8 aa, Artificial Sequence
  Description of Artificial Sequence: Synthetic peptide
  N-term H or Acetyl
  MOD_RES (1)..(1): Modified Cys
  MOD_RES (4)..(4): Ser or Phospho-Ser
  See specification as filed for detailed description of substitutions and preferred embodiments
CPGSRRRR

SEQ ID NO: 6166 - protein, 8 aa, Artificial Sequence
  Description of Artificial Sequence: Synthetic peptide
  N-term H or Acetyl
  MOD_RES (1)..(1): Modified Cys
  MOD_RES (4)..(4): Ser or Phospho-Ser
  See specification as filed for detailed description of substitutions and preferred embodiments
CPGSVRRR

SEQ ID NO: 6167 - protein, 8 aa, Artificial Sequence
  Description of Artificial Sequence: Synthetic peptide
  N-term H or Acetyl
  MOD_RES (1)..(1): Modified Cys
  MOD_RES (4)..(4): Ser or Phospho-Ser
  See specification as filed for detailed description of substitutions and preferred embodiments
CPGSWRRR

SEQ ID NO: 6168 - protein, 8 aa, Artificial Sequence
  Description of Artificial Sequence: Synthetic peptide
  N-term H or Acetyl
  MOD_RES (1)..(1): Modified Cys
  MOD_RES (4)..(4): Ser or Phospho-Ser
  See specification as filed for detailed description of substitutions and preferred embodiments
CPHSFRRR

SEQ ID NO: 6169 - protein, 8 aa, Artificial Sequence
  Description of Artificial Sequence: Synthetic peptide
  N-term H or Acetyl
  MOD_RES (1)..(1): Modified Cys
  MOD_RES (4)..(4): Ser or Phospho-Ser
  See specification as filed for detailed description of substitutions and preferred embodiments
CPISFRRR

SEQ ID NO: 6170 - protein, 8 aa, Artificial Sequence
  Description of Artificial Sequence: Synthetic peptide
  N-term H or Acetyl
  MOD_RES (1)..(1): Modified Cys
  MOD_RES (4)..(4): Ser or Phospho-Ser
  See specification as filed for detailed description of substitutions and preferred embodiments
CPKSFRRR

SEQ ID NO: 6171 - protein, 8 aa, Artificial Sequence
  Description of Artificial Sequence: Synthetic peptide
  N-term H or Acetyl
  MOD_RES (1)..(1): Modified Cys
  MOD_RES (4)..(4): Ser or Phospho-Ser
  See specification as filed for detailed description of substitutions and preferred embodiments
CPLSFRRR

SEQ ID NO: 6172 - protein, 8 aa, Artificial Sequence
  Description of Artificial Sequence: Synthetic peptide
  N-term H or Acetyl
  MOD_RES (1)..(1): Modified Cys
  MOD_RES (4)..(4): Ser or Phospho-Ser
  See specification as filed for detailed description of substitutions and preferred embodiments
CPNSFRRR

SEQ ID NO: 6173 - protein, 8 aa, Artificial Sequence
  Description of Artificial Sequence: Synthetic peptide
  N-term H or Acetyl
  MOD_RES (1)..(1): Modified Cys
  MOD_RES (4)..(4): Ser or Phospho-Ser
  See specification as filed for detailed description of substitutions and preferred embodiments
CPPSFRRR

SEQ ID NO: 6174 - protein, 8 aa, Artificial Sequence
  Description of Artificial Sequence: Synthetic peptide
  N-term H or Acetyl
  MOD_RES (1)..(1): Modified Cys
  MOD_RES (4)..(4): Ser or Phospho-Ser
  See specification as filed for detailed description of substitutions and preferred embodiments
CPQSFRRR

SEQ ID NO: 6175 - protein, 8 aa, Artificial Sequence
  Description of Artificial Sequence: Synthetic peptide
  N-term H or Acetyl
  MOD_RES (1)..(1): Modified Cys
  MOD_RES (4)..(4): Ser or Phospho-Ser
  See specification as filed for detailed description of substitutions and preferred embodiments
CPRSFRRR

SEQ ID NO: 6176 - protein, 8 aa, Artificial Sequence
  Description of Artificial Sequence: Synthetic peptide
  N-term H or Acetyl
  MOD_RES (1)..(1): Modified Cys
  MOD_RES (4)..(4): Ser or Phospho-Ser
  See specification as filed for detailed description of substitutions and preferred embodiments
CPVSFRRR

SEQ ID NO: 6177 - protein, 8 aa, Artificial Sequence
  Description of Artificial Sequence: Synthetic peptide
  N-term H or Acetyl
  MOD_RES (1)..(1): Modified Cys
  MOD_RES (4)..(4): Ser or Phospho-Ser
  See specification as filed for detailed description of substitutions and preferred embodiments
CQGSFRRR

SEQ ID NO: 6178 - protein, 8 aa, Artificial Sequence
  Description of Artificial Sequence: Synthetic peptide
  N-term H or Acetyl
  MOD_RES (1)..(1): Modified Cys
  MOD_RES (4)..(4): Ser or Phospho-Ser
  See specification as filed for detailed description of substitutions and preferred embodiments
CRGSFRRR

SEQ ID NO: 6179 - protein, 8 aa, Artificial Sequence
  Description of Artificial Sequence: Synthetic peptide
  N-term H or Acetyl
  MOD_RES (1)..(1): Modified Cys
  MOD_RES (4)..(4): Ser or Phospho-Ser
  See specification as filed for detailed description of substitutions and preferred embodiments
CVGSFRRR

SEQ ID NO: 6180 - protein, 7 aa, Artificial Sequence
  Description of Artificial Sequence: Synthetic peptide
  N-term H or Acetyl
  MOD_RES (1)..(1): Modified Cys
  MOD_RES (2)..(2): Leu or Nle (i.e. isomer of Leucine)
  MOD_RES (3)..(3): Ser or Phospho-Ser
  See specification as filed for detailed description of substitutions and preferred embodiments
CLSFRRR

SEQ ID NO: 6181 - protein, 7 aa, Artificial Sequence
  Description of Artificial Sequence: Synthetic peptide
  N-term H or Acetyl
  MOD_RES (1)..(1): Modified Cys
  MOD_RES (3)..(3): Ser or Phospho-Ser
  See specification as filed for detailed description of substitutions and preferred embodiments
CASFRRR

SEQ ID NO: 6182 - protein, 7 aa, Artificial Sequence
  Description of Artificial Sequence: Synthetic peptide
  N-term H or Acetyl
  MOD_RES (1)..(1): Modified Cys
  MOD_RES (3)..(3): Ser or Phospho-Ser
  See specification as filed for detailed description of substitutions and preferred embodiments
CDSFRRR

SEQ ID NO: 6183 - protein, 7 aa, Artificial Sequence
  Description of Artificial Sequence: Synthetic peptide
  N-term H or Acetyl
  MOD_RES (1)..(1): Modified Cys
  MOD_RES (3)..(3): Ser or Phospho-Ser
  See specification as filed for detailed description of substitutions and preferred embodiments
CESFRRR

SEQ ID NO: 6184 - protein, 7 aa, Artificial Sequence
  Description of Artificial Sequence: Synthetic peptide
  N-term H or Acetyl
  MOD_RES (1)..(1): Modified Cys
  MOD_RES (3)..(3): Ser or Phospho-Ser
  See specification as filed for detailed description of substitutions and preferred embodiments
CFSFRRR

SEQ ID NO: 6185 - protein, 7 aa, Artificial Sequence
  Description of Artificial Sequence: Synthetic peptide
  N-term H or Acetyl
  MOD_RES (1)..(1): Modified Cys
  MOD_RES (3)..(3): Ser or Phospho-Ser
  MOD_RES (4)..(4): Leu or Nle (i.e. isomer of Leucine)
  See specification as filed for detailed description of substitutions and preferred embodiments
CGSLRRR

SEQ ID NO: 6186 - protein, 7 aa, Artificial Sequence
  Description of Artificial Sequence: Synthetic peptide
  N-term H or Acetyl
  MOD_RES (1)..(1): Modified Cys
  MOD_RES (3)..(3): Ser or Phospho-Ser
  See specification as filed for detailed description of substitutions and preferred embodiments
CGSARRR

SEQ ID NO: 6187 - protein, 7 aa, Artificial Sequence
  Description of Artificial Sequence: Synthetic peptide
  N-term H or Acetyl
  MOD_RES (1)..(1): Modified Cys
  MOD_RES (3)..(3): Ser or Phospho-Ser
  See specification as filed for detailed description of substitutions and preferred embodiments
CGSDRRR

SEQ ID NO: 6188 - protein, 7 aa, Artificial Sequence
  Description of Artificial Sequence: Synthetic peptide
  N-term H or Acetyl
  MOD_RES (1)..(1): Modified Cys
  MOD_RES (3)..(3): Ser or Phospho-Ser
  See specification as filed for detailed description of substitutions and preferred embodiments
CGSERRR

SEQ ID NO: 6189 - protein, 7 aa, Artificial Sequence
  Description of Artificial Sequence: Synthetic peptide
  N-term H or Acetyl
  MOD_RES (1)..(1): Modified Cys
  MOD_RES (3)..(3): Ser or Phospho-Ser
  MOD_RES (5)..(5): Leu or Nle (i.e. isomer of Leucine)
  See specification as filed for detailed description of substitutions and preferred embodiments
CGSFLRR

SEQ ID NO: 6190 - protein, 7 aa, Artificial Sequence
  Description of Artificial Sequence: Synthetic peptide
  N-term H or Acetyl
  MOD_RES (1)..(1): Modified Cys
  MOD_RES (3)..(3): Ser or Phospho-Ser
  See specification as filed for detailed description of substitutions and preferred embodiments
CGSFARR

SEQ ID NO: 6191 - protein, 7 aa, Artificial Sequence
  Description of Artificial Sequence: Synthetic peptide
  N-term H or Acetyl
  MOD_RES (1)..(1): Modified Cys
  MOD_RES (3)..(3): Ser or Phospho-Ser
  See specification as filed for detailed description of substitutions and preferred embodiments
CGSFDRR

SEQ ID NO: 6192 - protein, 7 aa, Artificial Sequence
  Description of Artificial Sequence: Synthetic peptide
  N-term H or Acetyl
  MOD_RES (1)..(1): Modified Cys
  MOD_RES (3)..(3): Ser or Phospho-Ser
  See specification as filed for detailed description of substitutions and preferred embodiments
CGSFERR

SEQ ID NO: 6193 - protein, 7 aa, Artificial Sequence
  Description of Artificial Sequence: Synthetic peptide
  N-term H or Acetyl
  MOD_RES (1)..(1): Modified Cys
  MOD_RES (3)..(3): Ser or Phospho-Ser
  See specification as filed for detailed description of substitutions and preferred embodiments
CGSFFRR

SEQ ID NO: 6194 - protein, 7 aa, Artificial Sequence
  Description of Artificial Sequence: Synthetic peptide
  N-term H or Acetyl
  MOD_RES (1)..(1): Modified Cys
  MOD_RES (3)..(3): Ser or Phospho-Ser
  See specification as filed for detailed description of substitutions and preferred embodiments
CGSFGRR

SEQ ID NO: 6195 - protein, 7 aa, Artificial Sequence
  Description of Artificial Sequence: Synthetic peptide
  N-term H or Acetyl
  MOD_RES (1)..(1): Modified Cys
  MOD_RES (3)..(3): Ser or Phospho-Ser
  See specification as filed for detailed description of substitutions and preferred embodiments
CGSFHRR

SEQ ID NO: 6196 - protein, 7 aa, Artificial Sequence
  Description of Artificial Sequence: Synthetic peptide
  N-term H or Acetyl
  MOD_RES (1)..(1): Modified Cys
  MOD_RES (3)..(3): Ser or Phospho-Ser
  See specification as filed for detailed description of substitutions and preferred embodiments
CGSFIRR

SEQ ID NO: 6197 - protein, 7 aa, Artificial Sequence
  Description of Artificial Sequence: Synthetic peptide
  N-term H or Acetyl
  MOD_RES (1)..(1): Modified Cys
  MOD_RES (3)..(3): Ser or Phospho-Ser
  See specification as filed for detailed description of substitutions and preferred embodiments
CGSFKRR

SEQ ID NO: 6198 - protein, 7 aa, Artificial Sequence
  Description of Artificial Sequence: Synthetic peptide
  N-term H or Acetyl
  MOD_RES (1)..(1): Modified Cys
  MOD_RES (3)..(3): Ser or Phospho-Ser
  See specification as filed for detailed description of substitutions and preferred embodiments
CGSFLRR

SEQ ID NO: 6199 - protein, 7 aa, Artificial Sequence
  Description of Artificial Sequence: Synthetic peptide
  N-term H or Acetyl
  MOD_RES (1)..(1): Modified Cys
  MOD_RES (3)..(3): Ser or Phospho-Ser
  See specification as filed for detailed description of substitutions and preferred embodiments
CGSFNRR

SEQ ID NO: 6200 - protein, 7 aa, Artificial Sequence
  Description of Artificial Sequence: Synthetic peptide
  N-term H or Acetyl
  MOD_RES (1)..(1): Modified Cys
  MOD_RES (3)..(3): Ser or Phospho-Ser
  See specification as filed for detailed description of substitutions and preferred embodiments
CGSFPRR

SEQ ID NO: 6201 - protein, 7 aa, Artificial Sequence
  Description of Artificial Sequence: Synthetic peptide
  N-term H or Acetyl
  MOD_RES (1)..(1): Modified Cys
  MOD_RES (3)..(3): Ser or Phospho-Ser
  See specification as filed for detailed description of substitutions and preferred embodiments
CGSFQRR

SEQ ID NO: 6202 - protein, 7 aa, Artificial Sequence
  Description of Artificial Sequence: Synthetic peptide
  N-term H or Acetyl
  MOD_RES (1)..(1): Modified Cys
  MOD_RES (3)..(3): Ser or Phospho-Ser
  MOD_RES (6)..(6): Leu or Nle (i.e. isomer of Leucine)
  See specification as filed for detailed description of substitutions and preferred embodiments
CGSFRLR

SEQ ID NO: 6203 - protein, 7 aa, Artificial Sequence
  Description of Artificial Sequence: Synthetic peptide
  N-term H or Acetyl
  MOD_RES (1)..(1): Modified Cys
  MOD_RES (3)..(3): Ser or Phospho-Ser
  See specification as filed for detailed description of substitutions and preferred embodiments
CGSFRAR

SEQ ID NO: 6204 - protein, 7 aa, Artificial Sequence
  Description of Artificial Sequence: Synthetic peptide
  N-term H or Acetyl
  MOD_RES (1)..(1): Modified Cys
  MOD_RES (3)..(3): Ser or Phospho-Ser
  See specification as filed for detailed description of substitutions and preferred embodiments
CGSFRDR

SEQ ID NO: 6205 - protein, 7 aa, Artificial Sequence
  Description of Artificial Sequence: Synthetic peptide
  N-term H or Acetyl
  MOD_RES (1)..(1): Modified Cys
  MOD_RES (3)..(3): Ser or Phospho-Ser
  See specification as filed for detailed description of substitutions and preferred embodiments
CGSFRER

SEQ ID NO: 6206 - protein, 7 aa, Artificial Sequence
  Description of Artificial Sequence: Synthetic peptide
  N-term H or Acetyl
  MOD_RES (1)..(1): Modified Cys
  MOD_RES (3)..(3): Ser or Phospho-Ser
  See specification as filed for detailed description of substitutions and preferred embodiments
CGSFRFR

SEQ ID NO: 6207 - protein, 7 aa, Artificial Sequence
  Description of Artificial Sequence: Synthetic peptide
  N-term H or Acetyl
  MOD_RES (1)..(1): Modified Cys
  MOD_RES (3)..(3): Ser or Phospho-Ser
  See specification as filed for detailed description of substitutions and preferred embodiments
CGSFRGR

SEQ ID NO: 6208 - protein, 7 aa, Artificial Sequence
  Description of Artificial Sequence: Synthetic peptide
  N-term H or Acetyl
  MOD_RES (1)..(1): Modified Cys
  MOD_RES (3)..(3): Ser or Phospho-Ser
  See specification as filed for detailed description of substitutions and preferred embodiments
CGSFRHR

SEQ ID NO: 6209 - protein, 7 aa, Artificial Sequence
  Description of Artificial Sequence: Synthetic peptide
  N-term H or Acetyl
  MOD_RES (1)..(1): Modified Cys
  MOD_RES (3)..(3): Ser or Phospho-Ser
  See specification as filed for detailed description of substitutions and preferred embodiments
CGSFRIR

SEQ ID NO: 6210 - protein, 7 aa, Artificial Sequence
  Description of Artificial Sequence: Synthetic peptide
  N-term H or Acetyl
  MOD_RES (1)..(1): Modified Cys
  MOD_RES (3)..(3): Ser or Phospho-Ser
  See specification as filed for detailed description of substitutions and preferred embodiments
CGSFRKR

SEQ ID NO: 6211 - protein, 7 aa, Artificial Sequence
  Description of Artificial Sequence: Synthetic peptide
  N-term H or Acetyl
  MOD_RES (1)..(1): Modified Cys
  MOD_RES (3)..(3): Ser or Phospho-Ser
  See specification as filed for detailed description of substitutions and preferred embodiments
CGSFRLR

SEQ ID NO: 6212 - protein, 7 aa, Artificial Sequence
  Description of Artificial Sequence: Synthetic peptide
  N-term H or Acetyl
  MOD_RES (1)..(1): Modified Cys
  MOD_RES (3)..(3): Ser or Phospho-Ser
  See specification as filed for detailed description of substitutions and preferred embodiments
CGSFRNR

SEQ ID NO: 6213 - protein, 7 aa, Artificial Sequence
  Description of Artificial Sequence: Synthetic peptide
  N-term H or Acetyl
  MOD_RES (1)..(1): Modified Cys
  MOD_RES (3)..(3): Ser or Phospho-Ser
  See specification as filed for detailed description of substitutions and preferred embodiments
CGSFRPR

SEQ ID NO: 6214 - protein, 7 aa, Artificial Sequence
  Description of Artificial Sequence: Synthetic peptide
  N-term H or Acetyl
  MOD_RES (1)..(1): Modified Cys
  MOD_RES (3)..(3): Ser or Phospho-Ser
  See specification as filed for detailed description of substitutions and preferred embodiments
CGSFRQR

SEQ ID NO: 6215 - protein, 7 aa, Artificial Sequence
  Description of Artificial Sequence: Synthetic peptide
  N-term H or Acetyl
  MOD_RES (1)..(1): Modified Cys
  MOD_RES (3)..(3): Ser or Phospho-Ser
  MOD_RES (7)..(7): Leu or Nle (i.e. isomer of Leucine)
  See specification as filed for detailed description of substitutions and preferred embodiments
CGSFRRL

SEQ ID NO: 6216 - protein, 7 aa, Artificial Sequence
  Description of Artificial Sequence: Synthetic peptide
  N-term H or Acetyl
  MOD_RES (1)..(1): Modified Cys
  MOD_RES (3)..(3): Ser or Phospho-Ser
  See specification as filed for detailed description of substitutions and preferred embodiments
CGSFRRA

SEQ ID NO: 6217 - protein, 7 aa, Artificial Sequence
  Description of Artificial Sequence: Synthetic peptide
  N-term H or Acetyl
  MOD_RES (1)..(1): Modified Cys
  MOD_RES (3)..(3): Ser or Phospho-Ser
  See specification as filed for detailed description of substitutions and preferred embodiments
CGSFRRD

SEQ ID NO: 6218 - protein, 7 aa, Artificial Sequence
  Description of Artificial Sequence: Synthetic peptide
  N-term H or Acetyl
  MOD_RES (1)..(1): Modified Cys
  MOD_RES (3)..(3): Ser or Phospho-Ser
  See specification as filed for detailed description of substitutions and preferred embodiments
CGSFRRE

SEQ ID NO: 6219 - protein, 7 aa, Artificial Sequence
  Description of Artificial Sequence: Synthetic peptide
  N-term H or Acetyl
  MOD_RES (1)..(1): Modified Cys
  MOD_RES (3)..(3): Ser or Phospho-Ser
  See specification as filed for detailed description of substitutions and preferred embodiments
CGSFRRF

SEQ ID NO: 6220 - protein, 7 aa, Artificial Sequence
  Description of Artificial Sequence: Synthetic peptide
  N-term H or Acetyl
  MOD_RES (1)..(1): Modified Cys
  MOD_RES (3)..(3): Ser or Phospho-Ser
  See specification as filed for detailed description of substitutions and preferred embodiments
CGSFRRG

SEQ ID NO: 6221 - protein, 7 aa, Artificial Sequence
  Description of Artificial Sequence: Synthetic peptide
  N-term H or Acetyl
  MOD_RES (1)..(1): Modified Cys
  MOD_RES (3)..(3): Ser or Phospho-Ser
  See specification as filed for detailed description of substitutions and preferred embodiments
CGSFRRH

SEQ ID NO: 6222 - protein, 7 aa, Artificial Sequence
  Description of Artificial Sequence: Synthetic peptide
  N-term H or Acetyl
  MOD_RES (1)..(1): Modified Cys
  MOD_RES (3)..(3): Ser or Phospho-Ser
  See specification as filed for detailed description of substitutions and preferred embodiments
CGSFRRI

SEQ ID NO: 6223 - protein, 7 aa, Artificial Sequence
  Description of Artificial Sequence: Synthetic peptide
  N-term H or Acetyl
  MOD_RES (1)..(1): Modified Cys
  MOD_RES (3)..(3): Ser or Phospho-Ser
  See specification as filed for detailed description of substitutions and preferred embodiments
CGSFRRK

SEQ ID NO: 6224 - protein, 7 aa, Artificial Sequence
  Description of Artificial Sequence: Synthetic peptide
  N-term H or Acetyl
  MOD_RES (1)..(1): Modified Cys
  MOD_RES (3)..(3): Ser or Phospho-Ser
  See specification as filed for detailed description of substitutions and preferred embodiments
CGSFRRL

SEQ ID NO: 6225 - protein, 7 aa, Artificial Sequence
  Description of Artificial Sequence: Synthetic peptide
  N-term H or Acetyl
  MOD_RES (1)..(1): Modified Cys
  MOD_RES (3)..(3): Ser or Phospho-Ser
  See specification as filed for detailed description of substitutions and preferred embodiments
CGSFRRN

SEQ ID NO: 6226 - protein, 7 aa, Artificial Sequence
  Description of Artificial Sequence: Synthetic peptide
  N-term H or Acetyl
  MOD_RES (1)..(1): Modified Cys
  MOD_RES (3)..(3): Ser or Phospho-Ser
  See specification as filed for detailed description of substitutions and preferred embodiments
CGSFRRP

SEQ ID NO: 6227 - protein, 7 aa, Artificial Sequence
  Description of Artificial Sequence: Synthetic peptide
  N-term H or Acetyl
  MOD_RES (1)..(1): Modified Cys
  MOD_RES (3)..(3): Ser or Phospho-Ser
  See specification as filed for detailed description of substitutions and preferred embodiments
CGSFRRQ

SEQ ID NO: 6228 - protein, 7 aa, Artificial Sequence
  Description of Artificial Sequence: Synthetic peptide
  N-term H or Acetyl
  MOD_RES (1)..(1): Modified Cys
  MOD_RES (3)..(3): Ser or Phospho-Ser
  See specification as filed for detailed description of substitutions and preferred embodiments
CGSFRRR

SEQ ID NO: 6229 - protein, 7 aa, Artificial Sequence
  Description of Artificial Sequence: Synthetic peptide
  N-term H or Acetyl
  MOD_RES (1)..(1): Modified Cys
  MOD_RES (3)..(3): Ser or Phospho-Ser
  See specification as filed for detailed description of substitutions and preferred embodiments
CGSFRRV

SEQ ID NO: 6230 - protein, 7 aa, Artificial Sequence
  Description of Artificial Sequence: Synthetic peptide
  N-term H or Acetyl
  MOD_RES (1)..(1): Modified Cys
  MOD_RES (3)..(3): Ser or Phospho-Ser
  See specification as filed for detailed description of substitutions and preferred embodiments
CGSFRRW

SEQ ID NO: 6231 - protein, 7 aa, Artificial Sequence
  Description of Artificial Sequence: Synthetic peptide
  N-term H or Acetyl
  MOD_RES (1)..(1): Modified Cys
  MOD_RES (3)..(3): Ser or Phospho-Ser
  See specification as filed for detailed description of substitutions and preferred embodiments
CGSFRVR

SEQ ID NO: 6232 - protein, 7 aa, Artificial Sequence
  Description of Artificial Sequence: Synthetic peptide
  N-term H or Acetyl
  MOD_RES (1)..(1): Modified Cys
  MOD_RES (3)..(3): Ser or Phospho-Ser
  See specification as filed for detailed description of substitutions and preferred embodiments
CGSFRWR

SEQ ID NO: 6233 - protein, 7 aa, Artificial Sequence
  Description of Artificial Sequence: Synthetic peptide
  N-term H or Acetyl
  MOD_RES (1)..(1): Modified Cys
  MOD_RES (3)..(3): Ser or Phospho-Ser
  See specification as filed for detailed description of substitutions and preferred embodiments
CGSFVRR

SEQ ID NO: 6234 - protein, 7 aa, Artificial Sequence
  Description of Artificial Sequence: Synthetic peptide
  N-term H or Acetyl
  MOD_RES (1)..(1): Modified Cys
  MOD_RES (3)..(3): Ser or Phospho-Ser
  See specification as filed for detailed description of substitutions and preferred embodiments
CGSFWRR

SEQ ID NO: 6235 - protein, 7 aa, Artificial Sequence
  Description of Artificial Sequence: Synthetic peptide
  N-term H or Acetyl
  MOD_RES (1)..(1): Modified Cys
  MOD_RES (3)..(3): Ser or Phospho-Ser
  See specification as filed for detailed description of substitutions and preferred embodiments
CGSGRRR

SEQ ID NO: 6236 - protein, 7 aa, Artificial Sequence
  Description of Artificial Sequence: Synthetic peptide
  N-term H or Acetyl
  MOD_RES (1)..(1): Modified Cys
  MOD_RES (3)..(3): Ser or Phospho-Ser
  See specification as filed for detailed description of substitutions and preferred embodiments
CGSHRRR

SEQ ID NO: 6237 - protein, 7 aa, Artificial Sequence
  Description of Artificial Sequence: Synthetic peptide
  N-term H or Acetyl
  MOD_RES (1)..(1): Modified Cys
  MOD_RES (3)..(3): Ser or Phospho-Ser
  See specification as filed for detailed description of substitutions and preferred embodiments
CGSIRRR

SEQ ID NO: 6238 - protein, 7 aa, Artificial Sequence
  Description of Artificial Sequence: Synthetic peptide
  N-term H or Acetyl
  MOD_RES (1)..(1): Modified Cys
  MOD_RES (3)..(3): Ser or Phospho-Ser
  See specification as filed for detailed description of substitutions and preferred embodiments
CGSKRRR

SEQ ID NO: 6239 - protein, 7 aa, Artificial Sequence
  Description of Artificial Sequence: Synthetic peptide
  N-term H or Acetyl
  MOD_RES (1)..(1): Modified Cys
  MOD_RES (3)..(3): Ser or Phospho-Ser
  See specification as filed for detailed description of substitutions and preferred embodiments
CGSLRRR

SEQ ID NO: 6240 - protein, 7 aa, Artificial Sequence
  Description of Artificial Sequence: Synthetic peptide
  N-term H or Acetyl
  MOD_RES (1)..(1): Modified Cys
  MOD_RES (3)..(3): Ser or Phospho-Ser
  See specification as filed for detailed description of substitutions and preferred embodiments
CGSNRRR

SEQ ID NO: 6241 - protein, 7 aa, Artificial Sequence
  Description of Artificial Sequence: Synthetic peptide
  N-term H or Acetyl
  MOD_RES (1)..(1): Modified Cys
  MOD_RES (3)..(3): Ser or Phospho-Ser
  See specification as filed for detailed description of substitutions and preferred embodiments
CGSPRRR

SEQ ID NO: 6242 - protein, 7 aa, Artificial Sequence
  Description of Artificial Sequence: Synthetic peptide
  N-term H or Acetyl
  MOD_RES (1)..(1): Modified Cys
  MOD_RES (3)..(3): Ser or Phospho-Ser
  See specification as filed for detailed description of substitutions and preferred embodiments
CGSQRRR

SEQ ID NO: 6243 - protein, 7 aa, Artificial Sequence
  Description of Artificial Sequence: Synthetic peptide
  N-term H or Acetyl
  MOD_RES (1)..(1): Modified Cys
  MOD_RES (3)..(3): Ser or Phospho-Ser
  See specification as filed for detailed description of substitutions and preferred embodiments
CGSRRRR

SEQ ID NO: 6244 - protein, 7 aa, Artificial Sequence
  Description of Artificial Sequence: Synthetic peptide
  N-term H or Acetyl
  MOD_RES (1)..(1): Modified Cys
  MOD_RES (3)..(3): Ser or Phospho-Ser
  See specification as filed for detailed description of substitutions and preferred embodiments
CGSVRRR

SEQ ID NO: 6245 - protein, 7 aa, Artificial Sequence
  Description of Artificial Sequence: Synthetic peptide
  N-term H or Acetyl
  MOD_RES (1)..(1): Modified Cys
  MOD_RES (3)..(3): Ser or Phospho-Ser
  See specification as filed for detailed description of substitutions and preferred embodiments
CGSWRRR

SEQ ID NO: 6246 - protein, 7 aa, Artificial Sequence
  Description of Artificial Sequence: Synthetic peptide
  N-term H or Acetyl
  MOD_RES (1)..(1): Modified Cys
  MOD_RES (3)..(3): Ser or Phospho-Ser
  See specification as filed for detailed description of substitutions and preferred embodiments
CHSFRRR

SEQ ID NO: 6247 - protein, 7 aa, Artificial Sequence
  Description of Artificial Sequence: Synthetic peptide
  N-term H or Acetyl
  MOD_RES (1)..(1): Modified Cys
  MOD_RES (3)..(3): Ser or Phospho-Ser
  See specification as filed for detailed description of substitutions and preferred embodiments
CISFRRR

SEQ ID NO: 6248 - protein, 7 aa, Artificial Sequence
  Description of Artificial Sequence: Synthetic peptide
  N-term H or Acetyl
  MOD_RES (1)..(1): Modified Cys
  MOD_RES (3)..(3): Ser or Phospho-Ser
  See specification as filed for detailed description of substitutions and preferred embodiments
CKSFRRR

SEQ ID NO: 6249 - protein, 7 aa, Artificial Sequence
  Description of Artificial Sequence: Synthetic peptide
  N-term H or Acetyl
  MOD_RES (1)..(1): Modified Cys
  MOD_RES (3)..(3): Ser or Phospho-Ser
  See specification as filed for detailed description of substitutions and preferred embodiments
CNSFRRR

SEQ ID NO: 6250 - protein, 7 aa, Artificial Sequence
  Description of Artificial Sequence: Synthetic peptide
  N-term H or Acetyl
  MOD_RES (1)..(1): Modified Cys
  MOD_RES (3)..(3): Ser or Phospho-Ser
  See specification as filed for detailed description of substitutions and preferred embodiments
CPSFRRR

SEQ ID NO: 6251 - protein, 7 aa, Artificial Sequence
  Description of Artificial Sequence: Synthetic peptide
  N-term H or Acetyl
  MOD_RES (1)..(1): Modified Cys
  MOD_RES (3)..(3): Ser or Phospho-Ser
  See specification as filed for detailed description of substitutions and preferred embodiments
CQSFRRR

SEQ ID NO: 6252 - protein, 7 aa, Artificial Sequence
  Description of Artificial Sequence: Synthetic peptide
  N-term H or Acetyl
  MOD_RES (1)..(1): Modified Cys
  MOD_RES (3)..(3): Ser or Phospho-Ser
  See specification as filed for detailed description of substitutions and preferred embodiments
CRSFRRR

SEQ ID NO: 6253 - protein, 7 aa, Artificial Sequence
  Description of Artificial Sequence: Synthetic peptide
  N-term H or Acetyl
  MOD_RES (1)..(1): Modified Cys
  MOD_RES (3)..(3): Ser or Phospho-Ser
  See specification as filed for detailed description of substitutions and preferred embodiments
CVSFRRR

SEQ ID NO: 6254 - protein, 8 aa, Artificial Sequence
  Description of Artificial Sequence: Synthetic peptide
  N-term H or Acetyl
  MOD_RES (1)..(1): Leu or Nle (i.e. isomer of Leucine)
  MOD_RES (2)..(2): Modified Cys
  MOD_RES (4)..(4): Ser or Phospho-Ser
  See specification as filed for detailed description of substitutions and preferred embodiments
LCGSFRRR

SEQ ID NO: 6255 - protein, 8 aa, Artificial Sequence
  Description of Artificial Sequence: Synthetic peptide
  N-term H or Acetyl
  MOD_RES (2)..(2): Modified Cys
  MOD_RES (4)..(4): Ser or Phospho-Ser
  See specification as filed for detailed description of substitutions and preferred embodiments
ACGSFRRR

SEQ ID NO: 6256 - protein, 8 aa, Artificial Sequence
  Description of Artificial Sequence: Synthetic peptide
  N-term H or Acetyl
  MOD_RES (2)..(2): Modified Cys
  MOD_RES (4)..(4): Ser or Phospho-Ser
  See specification as filed for detailed description of substitutions and preferred embodiments
DCGSFRRR

SEQ ID NO: 6257 - protein, 8 aa, Artificial Sequence
  Description of Artificial Sequence: Synthetic peptide
  N-term H or Acetyl
  MOD_RES (2)..(2): Modified Cys
  MOD_RES (4)..(4): Ser or Phospho-Ser
  See specification as filed for detailed description of substitutions and preferred embodiments
ECGSFRRR

SEQ ID NO: 6258 - protein, 8 aa, Artificial Sequence
  Description of Artificial Sequence: Synthetic peptide
  N-term H or Acetyl
  MOD_RES (2)..(2): Modified Cys
  MOD_RES (4)..(4): Ser or Phospho-Ser
  See specification as filed for detailed description of substitutions and preferred embodiments
FCGSFRRR

SEQ ID NO: 6259 - protein, 8 aa, Artificial Sequence
  Description of Artificial Sequence: Synthetic peptide
  N-term H or Acetyl
  MOD_RES (2)..(2): Modified Cys
  MOD_RES (4)..(4): Ser or Phospho-Ser
  See specification as filed for detailed description of substitutions and preferred embodiments
GCGSFRRR

SEQ ID NO: 6260 - protein, 8 aa, Artificial Sequence
  Description of Artificial Sequence: Synthetic peptide
  N-term H or Acetyl
  MOD_RES (2)..(2): Modified Cys
  MOD_RES (4)..(4): Ser or Phospho-Ser
  See specification as filed for detailed description of substitutions and preferred embodiments
HCGSFRRR

SEQ ID NO: 6261 - protein, 8 aa, Artificial Sequence
  Description of Artificial Sequence: Synthetic peptide
  N-term H or Acetyl
  MOD_RES (2)..(2): Modified Cys
  MOD_RES (4)..(4): Ser or Phospho-Ser
  See specification as filed for detailed description of substitutions and preferred embodiments
ICGSFRRR

SEQ ID NO: 6262 - protein, 8 aa, Artificial Sequence
  Description of Artificial Sequence: Synthetic peptide
  N-term H or Acetyl
  MOD_RES (2)..(2): Modified Cys
  MOD_RES (4)..(4): Ser or Phospho-Ser
  See specification as filed for detailed description of substitutions and preferred embodiments
KCGSFRRR

SEQ ID NO: 6263 - protein, 8 aa, Artificial Sequence
  Description of Artificial Sequence: Synthetic peptide
  N-term H or Acetyl
  MOD_RES (2)..(2): Modified Cys
  MOD_RES (4)..(4): Ser or Phospho-Ser
  See specification as filed for detailed description of substitutions and preferred embodiments
LCGSFRRR

SEQ ID NO: 6264 - protein, 8 aa, Artificial Sequence
  Description of Artificial Sequence: Synthetic peptide
  N-term H or Acetyl
  MOD_RES (2)..(2): Modified Cys
  MOD_RES (4)..(4): Ser or Phospho-Ser
  See specification as filed for detailed description of substitutions and preferred embodiments
NCGSFRRR

SEQ ID NO: 6265 - protein, 8 aa, Artificial Sequence
  Description of Artificial Sequence: Synthetic peptide
  N-term H or Acetyl
  MOD_RES (2)..(2): Modified Cys
  MOD_RES (4)..(4): Ser or Phospho-Ser
  See specification as filed for detailed description of substitutions and preferred embodiments
QCGSFRRR

SEQ ID NO: 6266 - protein, 8 aa, Artificial Sequence
  Description of Artificial Sequence: Synthetic peptide
  N-term H or Acetyl
  MOD_RES (2)..(2): Modified Cys
  MOD_RES (4)..(4): Ser or Phospho-Ser
  See specification as filed for detailed description of substitutions and preferred embodiments
RCGSFRRR

SEQ ID NO: 6267 - protein, 8 aa, Artificial Sequence
  Description of Artificial Sequence: Synthetic peptide
  N-term H or Acetyl
  MOD_RES (2)..(2): Modified Cys
  MOD_RES (4)..(4): Ser or Phospho-Ser
  See specification as filed for detailed description of substitutions and preferred embodiments
VCGSFRRR

SEQ ID NO: 6268 - protein, 8 aa, Artificial Sequence
  Description of Artificial Sequence: Synthetic peptide
  N-term H or Acetyl
  MOD_RES (2)..(2): Modified Cys
  MOD_RES (4)..(4): Ser or Phospho-Ser
  See specification as filed for detailed description of substitutions and preferred embodiments
PCGSFRRR

SEQ ID NO: 6269 - protein, 19 aa, Artificial Sequence
  Description of Artificial Sequence: Synthetic peptide
  N-term H or Acetyl
  MOD_RES (3)..(3): Modified Cys
  MOD_RES (5)..(5): Ser or Phospho-Ser
  See specification as filed for detailed description of substitutions and preferred embodiments
LDCASLSLSLSSANSLYDD

SEQ ID NO: 6270 - protein, 17 aa, Artificial Sequence
  Description of Artificial Sequence: Synthetic peptide
  N-term H or Acetyl
  MOD_RES (6)..(6): Modified Cys
  MOD_RES (8)..(8): Ser or Phospho-Ser
  See specification as filed for detailed description of substitutions and preferred embodiments
SGDEDCASIADMDFSAL

SEQ ID NO: 6271 - protein, 20 aa, Artificial Sequence
  Description of Artificial Sequence: Synthetic peptide
  N-term H or Acetyl
  MOD_RES (8)..(8): Ser or Phospho-Ser
  MOD_RES (10)..(10): Modified Cys
  See specification as filed for detailed description of substitutions and preferred embodiments
SGDEDFASICDMDFSALLSQ

SEQ ID NO: 6272 - protein, 19 aa, Artificial Sequence
  Description of Artificial Sequence: Synthetic peptide
  N-term H or Acetyl
  MOD_RES (5)..(5): Ser or Phospho-Ser
  MOD_RES (7)..(7): Modified Cys
  See specification as filed for detailed description of substitutions and preferred embodiments
EDFASICDMDFSALLSQIS

SEQ ID NO: 6273 - protein, 20 aa, Artificial Sequence
  Description of Artificial Sequence: Synthetic peptide
  N-term H or Acetyl
  MOD_RES (10)..(10): Modified Cys
  MOD_RES (12)..(12): Ser or Phospho-Ser
  See specification as filed for detailed description of substitutions and preferred embodiments
SLDSSSLALCLSAANSLYDD

SEQ ID NO: 6274 - protein, 20 aa, Artificial Sequence
  Description of Artificial Sequence: Synthetic peptide
  N-term H or Acetyl
  MOD_RES (8)..(8): Ser or Phospho-Ser
  MOD_RES (10)..(10): Modified Cys
  See specification as filed for detailed description of substitutions and preferred embodiments
SLDSSSLSLCLASANSLYDD

SEQ ID NO: 6275 - protein, 23 aa, Artificial Sequence
  Description of Artificial Sequence: Synthetic peptide
  N-term H or Acetyl
  MOD_RES (12)..(12): Ser or Phospho-Ser
  MOD_RES (14)..(14): Modified Cys
  See specification as filed for detailed description of substitutions and preferred embodiments
DLGYAKDVDQGSLCTSFVGTLQY

SEQ ID NO: 6276 - protein, 18 aa, Artificial Sequence
  Description of Artificial Sequence: Synthetic peptide
  N-term H or Acetyl
  MOD_RES (14)..(14): Leu or Nle (i.e. isomer of Leucine)
  MOD_RES (15)..(15): Ser or Phospho-Ser
  MOD_RES (17)..(17): Modified Cys
  See specification as filed for detailed description of substitutions and preferred embodiments
RRKDLHDDEEDEALSICA

SEQ ID NO: 6277 - protein, 22 aa, Artificial Sequence
  Description of Artificial Sequence: Synthetic peptide
  N-term H or Acetyl
  MOD_RES (11)..(11): Ser or Phospho-Ser
  MOD_RES (12)..(12): Leu or Nle (i.e. isomer of Leucine)
  MOD_RES (13)..(13): Modified Cys
  See specification as filed for detailed description of substitutions and preferred embodiments
KKKVSGQLIDSLCNSFVGTRSY

SEQ ID NO: 6278 - protein, 22 aa, Artificial Sequence
  Description of Artificial Sequence: Synthetic peptide
  N-term H or Acetyl
  MOD_RES (12)..(12): Leu or Nle (i.e. isomer of Leucine)
  MOD_RES (13)..(13): Modified Cys
  MOD_RES (15)..(15): Ser or Phospho-Ser
  See specification as filed for detailed description of substitutions and preferred embodiments
KKKVSGQLIDSLCNSFVGTRSY
